(19) United States
(12) Patent Application Publication
(10) Pub. No.: US 2019/0330335 A1
(43) Pub. Date: Oct. 31, 2019

(54) ANTI-TREM2 ANTIBODIES AND METHODS OF USE THEREOF

(71) Applicant: ALECTOR LLC, South San Francisco, CA (US)

(72) Inventors: Tina SCHWABE, San Francisco, CA (US); Francesca AVOGADRI-CONNORS, South San Francisco, CA (US); Helen LAM, South San Francisco, CA (US); Ilaria TASSI, San Francisco, CA (US); Seung-Joo LEE, Benicia, CA (US); Arnon ROSENTHAL, Woodside, CA (US)

(73) Assignee: ALECTOR LLC, South San Francisco, CA (US)

(21) Appl. No.: 15/766,363

(22) PCT Filed: Oct. 6, 2016
(86) PCT No.: PCT/US2016/055828

§ 371 Date: Apr. 5, 2018

Related U.S. Application Data
(60) Provisional application No. 62/369,666, filed on Aug. 1, 2016.
(60) Provisional application No. 62/238,044, filed on Oct. 6, 2015.

(51) Int. Cl. C07K 16/28; A61P 25/28

(52) U.S. Cl. CPC C07K 16/2803; A61P 25/28; C07K 2317/34; A61K 2039/505; C07K 2317/75; C07K 2317/24; C07K 2317/76; C07K 2317/92

(57) ABSTRACT

The present disclosure is generally directed to compositions that include antibodies, e.g., monoclonal, chimeric, humanized antibodies, antibody fragments, etc., that specifically bind a TREM2 protein, e.g., a mammalian TREM2 or human TREM2, and use of such compositions in preventing, reducing risk, or treating an individual in need thereof.

### CROSS-REFERENCE TO RELATED APPLICATIONS

[0001] This application is a U.S. national stage application of PCT/US2016/055828, filed internationally on Oct. 6, 2016, which claims the benefit of U.S. Provisional Application No. 62/238,044, filed Oct. 6, 2015, and U.S. Provisional Application No. 62/369,666, filed Aug. 1, 2016, each of which is hereby incorporated by reference in its entirety.

### SUBMISSION OF SEQUENCE LISTING ON ASCII TEXT FILE

[0002] The content of the following submission on ASCII text file is incorporated herein by reference in its entirety: a computer readable form (CRF) of the Sequence Listing (file name: 735022000900SEQLIST.txt, date recorded: Apr. 5, 2018, size: 651 KB).

### FIELD OF THE PRESENT DISCLOSURE

[0003] The present disclosure relates to anti-TREM2 antibodies and therapeutic uses of such antibodies.

### BACKGROUND OF THE PRESENT DISCLOSURE

[0004] Triggering receptor expressed on myeloid cells-2 (TREM2) is an immunoglobulin-like receptor that is expressed primarily on myeloid lineage cells, such as macrophages, dendritic cells, monocytes, Langerhans cells of skin, Kupffer cells, osteoclasts, and microglia; and is required for modulation of Toll-like receptor (TLR) signaling, the modulation of inflammatory cytokines, as well as for normal osteoclast development. TREM2 was discovered as a member of the TREM transmembrane glycoproteins, which belong to the single immunoglobulin variable (IgV) domain receptor family. The genes encoding human and mouse TREMs map to human chromosome 6p21.1 and mouse chromosome 17C3, respectively. The TREM cluster includes genes encoding TREM1, TREM2, TREM4, and TREM5, as well as the TREM-like genes in both human and mouse. Additionally TREM3 and plasmocytoid dendritic cell (pDC)-TREM were identified in mouse. The TREM-like genes, TREML1 and TREML2 in humans, and Treml1 and Treml2 in mouse, encode TLT-1 and TLT-2 proteins respectively. The two best characterized of these receptor family, TREM1 and TREM2, display −20% sequence homology as well as some homology with other members of the Ig-SF such as activating NK cells receptors (20% identity with NKp44) and act through association with a DAP12-mediated pathway for signaling.

[0005] TREM2 was originally cloned as a cDNA encoding a TREM1 homologue (Bouchon, A et al., J Exp Med, 2001. 194(8): p. 1111-22). This receptor is a glycoprotein of about 40 kDa, which is reduced to 26 kDa after N-deglycosylation. The TREM2 gene encodes a 230 amino acid-length protein that includes an extracellular domain, a transmembrane region and a short cytoplasmic tail. The extracellular region, encoded by exon 2, is composed of a single type V Ig-SF domain, containing three potential N-glycosylation sites. The putative transmembrane region contains a charged lysine residue. The cytoplasmic tail of TREM2 lacks signaling motifs and is thought to signal through the signaling adaptor molecule DAP12/TRYROBP.

[0006] The signaling adaptor molecule DAP12 is expressed as a homodimer at the surface of a variety of cells participating in innate immune response, including microglia, macrophages, granulocytes, NK cells, and dendritic cells (DC). DAP12 is a member of the type I transmembrane adapter protein family on the basis of homology with the human T-cell receptor (TCR)-associated CD3 chains and the Fc receptor (FcR) γ-chain (Turnbull, I R and Colonna, M, Nat Rev Immunol, 2007. 7(2): p. 155-61). These proteins share many structural and functional characteristics, including one or more ITAM motifs in their cytoplasmic domain, charged acidic residue in transmembrane region (critical for interaction with its partner chain) and the ability to recruit Src homology domain-2 (SH2)-containing proteins following tyrosine phosphorylation. The ITAM motif mediates signal propagation by activation of the ZAP70 or Syk tyrosine kinase. Both kinases phosphorylate several substrates, thereby facilitating the formation of a signaling complex leading to cellular activation. Interestingly, some B-cells and T-cells also express DAP12 under inflammatory conditions. In humans, subsets of CD4⁺CD28⁻ T-cells, αβTCR⁺CD4⁺ T-cells, and CD8⁺ T-cells expressing this protein have been described in patients suffering from chronic inflammatory diseases, in the context of autoimmune T cells (Schleinitz, N. et al., PLoS ONE, 4 (2009), p. e6264). In view of the significant level of DAP12 expression in mouse peritoneal macrophages, this protein is believed to be expressed in other macrophage-related cells, such as osteoclasts in the bone marrow, Kupffer cells in the liver, alveolar macrophages of the lung, Langerhans cells of skin, and microglial cells in the brain (Takaki, R et al., Immunol Rev, 2006. 214: p. 118-29).

[0007] TREM2 has been identified as expressed on the surface of human monocyte-derived dendritic cells and as an mRNA transcript in the mouse macrophage cell line RAW264 (Bouchon, A et al., J Exp Med, 2001. 194(8): p. 1111-22). Human TREM2 was the first DAP12-associated receptor described on the surface of DCs. Studies have demonstrated that TREM2 cell surface expression is reduced in DAP12-deficient bone marrow-derived dendritic cells (BMDCs) and in DAP12-deficient macrophages, as compared to wild-type cells (Ito, H and Hamerman, J A, Eur J Immunol. 42(1): p. 176-85; Hamerman, J A et al., J Immunol, 2006. 177(4): p. 2051-5; and Hamerman, J A et al., Nat Immunol, 2005. 6(6): p. 579-86). This indicates that formation of the TREM2/DAP12 complex is needed for maximal TREM2 surface expression.

[0008] Recent studies have also shown cell-surface expression of TREM2 on macrophages infiltrating tissue from the circulation, as well as on macrophages activated by IL-4 or IL-13 (Turnbull, I R et al., J Immunol, 2006. 177(6): p. 3520-4). However, TREM2 expression was not always found in other cell populations, such as tissue-resident macrophages, circulating monocytes, or the corresponding progenitor cells in the bone marrow, suggesting that TREM2 expression is not induced centrally, but locally during tissue infiltration or by cytokine-mediated activation. Moreover, it has also been observed that IFN-γ and LPS reduce TREM2 expression. Further, it has been recently reported that TREM2 is highly expressed on microglia and infiltrating macrophages in the central nervous system during experimental autoimmune encaphalomyelitis or Alzheimer's disease (Picchio, L et al., Eur J Immunol, 2007. 37(5): p. 1290-301; and Wang Y, Cell. 2015 Mar. 12; 160(6):1061-71).

[0009] It has been shown that TREM2 signals through DAP12. Downstream this leads to activation of the Syk/Zap70 tyrosine kinase family, PI3K, and other intracellular signals. On myeloid cells, TLR signals are important for activation, such as with infection response, but also play a key role in the pathological inflammatory response, such as with macrophages and dendritic cells (Hamerman, J A et al., (2006) J Immunol 177: 2051-2055; Ito, H et al., Eur J Immunol 42: 176-185; Neumann, H et al., (2007) J Neuroimmunol 184: 92-99; Takahashi, K et al., (2005) J Exp Med 201: 647-657; and Takahashi, K et al., (2007) PLoS Med 4: e124). Deficiency of either TREM2 or DAP12 is thought to lead to increased pro-inflammatory signaling. The impact of TREM2-deficiency in vitro has been shown in the context of stimulation with typical TLR ligands, such as LPS, CpG DNA, and Zymosan. TREM-2-deficient dendritic cells show increased release of IL-12p70, TNF, IL-6, and IL-10 in the presence, but not in the absence of stimulation.

[0010] Several recent studies have explored the intracellular signaling events induced by the activation of the TREM2/DAP12 pathway. For example, TREM2 is thought to activate signaling pathways involved in cell survival (e.g., protein kinase B-Akt), cell activation and differentiation (e.g., Syk, Erk1/2, PLC-γ, etc.), and in the control of the actin cytoskeleton (e.g., Syk, Vav, etc.) (Peng, Q et al., Sci Signal. 3(122): p. ra38; and Whittaker, G C et al., J Biol Chem. 285(5): p. 2976-85). After ligation of TREM2, the ITAM tyrosines in DAP12 are phosphorylated by SRC-family kinases leading to the recruitment and activation of the Syk kinase and/or ZAP70 kinase. In the mouse, Syk may be the predominant kinase involved, whereas in humans both Syk and ZAP70 appear to couple efficiently with such ITAM-containing subunits, binding them through their tandem SH2 domains.

[0011] Studies on TREM2 signaling have shown that, like TREM1, TREM2-mediated signaling through DAP12 also leads to an increase in intracellular calcium ion levels and ERK1/2 phosphorylation of ERK1/2 (Bouchon, A et al., J Exp Med, 2001. 194(8): p. 1111-22; and Sharif, 0 and Knapp, S, Immunobiology, 2008. 213(9-10): p. 701-13). Importantly, TREM2 receptor ligation may not induce the degradation of IkB-a and the subsequent nuclear translocation of NF-kB, which points to a possible difference between TREM2 and TREM1 signaling (Bouchon, A et al., J Exp Med, 2001. 194(8): p. 1111-22). Receptor cross-linking of TREM2 on immature dendritic cells triggers the up-regulation of molecules involved in T-cell co-stimulation, such as CD86, CD40, and MHC class II, as well as the up-regulation of the chemokine receptor CCR7 (Bouchon, A et al., J Exp Med, 2001. 194(8): p. 1111-22). TREM2 is also expressed on microglia, where receptor cross-linking results in an increase in ERK1/2 phosphorylation and CCR7, but not an increase in CD86 or MHC class II expression, suggesting possible cell type-specific differences in TREM2 signaling. Additionally, over expression of TREM2 signaling in microglia, myeloid Precursors, CHO or EK293 cells results in an increase in phagocytosis of apoptotic neurons, nerve and non-nerve tissue debris in the nervous system, disease causing proteins, bacteria and other foreign invaders, which is accompanied by a polarization and re-organization of F-actin in an ERK-dependent manner (Takahashi, K et al., PLoS Med, 2007. 4(4): p. e124; Neumann, H and Takahashi, K, J Neuroimmunol, 2007. 184(1-2): p. 92-9; and Kleinberg et al., Sci Transl Med. 2014 Jul. 2; 6(243):243ra86). However in some physiological contexts such as Pneumococcal Pneumonia, TREM2 appear to decrease phagocytosis. Thus TREM2 deficient alveolar macrophages display augmented bacterial clearance from the lung and enhanced phagocytosis of bacteria in vivo (Sharif et al., PLoS Pathog. 2014 Jun. 12; 10(6):e1004167).

[0012] It has also been shown that bone marrow-derived macrophages (BMDM) that have been silenced for TREM2 using shRNAi display increased secretion of TNF in response to the TLR2/6 ligand zymosan and the TLR9 ligand CpG, as compared to control BMDM cells that were treated with a non-specific shRNAi, indicating that TREM2 negatively regulates cytokine synthesis in macrophages (Ito, H and Hamerman, J A, Eur J Immunol. 42(1): p. 176-85; Hamerman, J A et al., J Immunol, 2006. 177(4): p. 2051-5; and Hamerman, J A et al., Nat Immunol, 2005. 6(6): p. 579-86). These results have been confirmed using BMDM cells from TREM2 knockout mice, and have further shown that levels of TNF and IL-6 were also higher in TREM2^{-/-} BMDM cells in response to LPS, as compared to wild-type BMDM cells (Turnbull, I R, et al., J Immunol, 2006. 177(6): p. 3520-4; and Turnbull, I R and Colonna, M, Nat Rev Immunol, 2007. 7(2): p. 155-61). Additionally, TREM2 overexpression in microglia has been demonstrated to lead to a decrease in TNF and inducible nitric oxide (iNOS) mRNA after culture of these cells with apoptotic neurons, whereas TREM2 knockdown resulted in a modest increase in TNF and iNOS mRNA levels. This indicates that, in contrast to TREM1, which is a positive regulator of cytokine synthesis, TREM2 is a negative regulator of cytokine synthesis. This effect of TREM2 on inflammation was thought to be independent of the type of macrophage as it occurs in both microglia and BMDM cells.

[0013] It has also been shown that in resident myeloid cells of the central nervous system, activation of microglia can lead to inflammation (Neumann, H et al., (2007) J Neuroimmunol 184: 92-99; Takahashi, K et al., (2005) J Exp Med 201: 647-657; Takahashi, K et al., (2007) PLoS Med 4: e124; and Hsieh, C L et al., (2009) J Neurochem 109: 1144-1156). Moreover, microglia activation has also been implicated in frontotemporal dementia (FTD), Alzheimer's disease, Parkinson's disease, stroke/ischemic brain injury, and multiple sclerosis. Whereas reduced TREM2 activation leads to increases in certain activation and inflammation markers, such as NOS2 gene transcription in myeloid cells, increased TREM2 activation leads to reduced NOS2 transcription. It is thought that dying neurons express an endogenous ligand for TREM2. HSP60 has been implicated as a ligand of TREM2 on neuroblastoma cells (Stefani, L et al., (2009) Neurochem 110: 284-294). TREM2 over-expression also leads to increased phagocytosis of dying neurons by microglia, and similarly increases phagocytosis by other myeloid lineage cells. TREM2 has also been implicated in myeloid cell migration, as TREM2 deficient myeloid cells fail to populate the brain of rodent models for Alzheimer's disease (Malm, T M et al, Neurotherapeutics. 2014 Nov. 18).

[0014] In humans, the complete absence of TREM2 has been shown to cause Nasu-Hakola disease, a rare neurodegenerative disease with late-onset dementia, demyelination, and cerebral atrophy (Paloneva, J et al., (2002) Am J Hum Genet 71: 656-662; and Paloneva, J et al., (2003) J Exp Med 198: 669-675). Nasu-Hakola disease can also be caused by DAP12-deficiency. Further, exome sequencing of individuals with frontotemporal dementia (FTD) presentation has identified homozygous mutations in TREM2 (Guerreiro, R J et al., (2013) JAMA Neurol 70: 78-84; Guerreiro, R J et al., (2012) Arch Neurol: 1-7). More recently, heterozygous mutations in TREM2 were found to increase the risk of Alzheimer's disease by up to 3 fold (Guerreiro, R et al., (2013) N Engl J Med 368: 117-127; Jonsson, T et al., (2013) N Engl J Med 368: 107-116; and Neumann, H et al., (2013) N Engl J Med 368: 182-184). Even individuals without Alzheimer's disease who carry a heterozygous TREM2 mutation show worse cognition as compared to individuals with two normal TREM2 alleles. These carriers also display doubling in the rate of brain volume shrinkage (Rajagopalan et al., (2013) N Engl J Med 369; 16). Some of these mutations lead to truncation and likely loss-of-function of TREM2. While others involve changes in amino acids including, Q33X, R47H, T66M, and S116C (Borroni B, et al. Neurobiol Aging. 2014 April; 35(4):934.e7-10). Imaging analysis in certain individuals with TREM2 homozygous mutations has also shown evidence of demyelination. Further, it has been shown that the R47H variant of TREM2 (arginine to histidine amino acid substitution at position 47 of TREM2), which is the most common TREM2 mutation, is located within the immunoglobulin domain of TREM2 and reduces ligand binding. Other TREM2 mutations were shown to reduce cell surface expression of TREM2 indicating that loss of function is the cause of increased risk for AD (Wang Y, Cell. 2015; 160(6):1061-71).

[0015] In addition an integrative network-based approach to rank-ordered organized structure of molecular networks of gene expression for relevance to late onset developing Alzheimer's disease (LOAD) identified TYROBP/DAP12 as the signaling molecule for TREM2 as a key regulator of the immune/microglia gene modules that is associated with LOAD. TYROBP was found to be the causal regulator of the highest scoring immune/microglia module as rank-ordered based on the number of other genes that TREM2 regulated and the magnitude of loss of regulation, as well as differential expression in LOAD brains. TYROBP was significantly upregulated in LOAD brains and there was a progression of TYROBP expression changes across mild cognitive impairment (MCI), which often precedes LOAD (Zhang et al., (2013) Cell 153, 707-720; and Ma et al., Mol Neurobiol. 2014 Jul. 23). Targeting such causal networks in ways that restore them to a normal state may be a way to treat disease.

[0016] TREM2 is highly expressed on microglia and infiltrating macrophages in the central nervous system during pathological conditions including Alzheimer's disease (Picchio, L et al., (2007) Eur J Immunol, 37(5): p. 1290-301; and Wang et al., (2015), Cell.; 160(6):1061-71). TREM2 gene expression has also been shown to be increased in APP23 transgenic mice, an Alzheimer's disease model in which the mice express a mutant form of the amyloid precursor protein that is associated with familial Alzheimer's disease (Melchior, B et al., ASN Neuro 2: e00037). Uptake of Amyloid 1-42 has also been shown to be increased in BV-2 microglial cell lines that overexpress TREM2.

[0017] TREM2 has further been shown to be upregulated in the EAE mouse model of multiple sclerosis (Neumann, H et al., (2007) J Neuroimmunol 184: 92-99; Takahashi, K et al., (2005) J Exp Med 201: 647-657; and Takahashi, K et al., (2007) PLoS Med 4: e124). The transduction of bone marrow-derived myeloid precursor cells (BM-DC) in vitro with TREM2 leads to increased phagocytosis of beads or of neuron fragments. In response to LPS, these cells show increased IL-10 and decreased IL-1β. Intravenous transplantation of myeloid cells overexpressing TREM2 can suppress EAE in vivo. Conversely, deficiency in TREM2 was shown to exacerbate Multiple Sclerosis in a Cuprizon model of the disease (Cantoni et al., Acta Neuropathol (2015)129(3):429-47; Luigi Poliani et al., (2015) J Clin Invest. 125(5):2161-2170). Deficiency in TREM2 was also shown to also exacerbate Alzheimer's disease in a rodent model (Wang et al., (2015), Cell.; 160(6):1061-71), although opposing data showing beneficial effect of TREM2 deficiency Alzheimer's disease in a rodent model have also been reported (Jay et al., (2015) J Exp Med 212:287-295). TREM2 was also shown to be required for survival of microglia in the brain (Otero et al., (2009) Nat Immunol.; 10:734-43). In summary, TREM2 variants were identified as genetic risk factors for frontotemporal dementia, Parkinson's disease, and amyotrophic lateral sclerosis (Borroni B, et al. Neurobiol Aging. 2014 April; 35(4):934.e7-10; Rayaprolu S, et al., Mol Neurodegener. 2013 Jun. 21; 8:19; and Cady J, et al., JAMA Neurol. 2014 April; 71(4):449-53). This common genetic linkage suggests a more general role for TREM2 in modulating neurodegenerative disease pathology.

[0018] TREM2 antibodies have been described, but the only reported effects are on cultured cells and their therapeutic utility is limited in part because they block interaction between TREM2 and its natural ligands, and act as antagonists in solution. Such antibodies in solution would mimic the disease causing loss of function phenotype of TREM2 mutations and would therefor pose a safety and efficacy risk. Another problem with existing anti-TREM2 antibodies is their requirement to be clustered by coating on a plastic plate or by secondary antibodies in order to induce agonistic activity. Accordingly, there is a need for antibodies that specifically bind TREM2 on a cell surface and that modulate (e.g., activate) one or more TREM2 activities in a safe and effective way in order to treat one or more diseases, disorders, and conditions associated with decreased TREM2 activity.

[0019] Some diseases may require TREM2 blocking antibodies that do not activate TREM2 under any circumstances. For example, the tumor microenvironment is composed of a heterogeneous immune infiltrate, which include T lymphocytes, macrophages and cells of myeloid/granulocytic lineage. Therapeutic approaches that modulate specific subsets of immune cells are changing the standard of care. “Checkpoint blocking” antibodies targeting immune-modulatory molecules expressed on T cells (such as CTLA-4 and PD-1) have demonstrated clinical activity across a variety of tumor types (Naidoo—et al., (2014) British Journal of Cancer 111, 2214-2219).

[0020] Cancer immune-therapy targeting tumor-associated macrophages (e.g., M2-type macrophages) is an intense area of research. The presence of M2-macrophages in tumors is associated with poor prognosis.

[0021] Accordingly, there is also a need for antibodies that specifically bind TREM2 on a cell surface and modulate (e.g., inhibit and/or otherwise reduce) ligand binding and/or one or more TREM2 activities in order to prevent, reduce the risk of, or treat cancer.

[0022] All references cited herein, including patent applications and publications, are hereby incorporated by reference in their entirety.

### SUMMARY OF THE PRESENT DISCLOSURE

[0023] The present disclosure is generally directed to compositions that include antibodies, e.g., monoclonal, chimeric, humanized antibodies, antibody fragments, etc., that specifically bind a TREM2 protein, e.g., a mammalian TREM2 (e.g., any non-human mammal) or human TREM2, and to methods of using such compositions. The antibodies of the present disclosure may include agonist, antagonist, or inert antibodies. The methods provided herein find use in preventing, reducing risk, or treating an individual having dementia, frontotemporal dementia, Alzheimer's disease, vascular dementia, mixed dementia, Creutzfeldt-Jakob disease, normal pressure hydrocephalus, amyotrophic lateral sclerosis, Huntington's disease, tauopathy disease, Nasu-Hakola disease, stroke, acute trauma, chronic trauma, cognitive deficit, memory loss, lupus, acute and chronic colitis, rheumatoid arthritis, wound healing, Crohn's disease, inflammatory bowel disease, ulcerative colitis, obesity, malaria, essential tremor, central nervous system lupus, Behcet's disease, Parkinson's disease, dementia with Lewy bodies, multiple system atrophy, Shy-Drager syndrome, progressive supranuclear palsy, cortical basal ganglionic degeneration, acute disseminated encephalomyelitis, granulomartous disorders, sarcoidosis, diseases of aging, seizures, spinal cord injury, traumatic brain injury, age related macular degeneration, glaucoma, retinitis pigmentosa, retinal degeneration, respiratory tract infection, sepsis, eye infection, systemic infection, lupus, arthritis, multiple sclerosis, low bone density, osteoporosis, osteogenesis, osteopetrotic disease, Paget's disease of bone, solid and blood cancer, bladder cancer, brain cancer, breast cancer, colon cancer, rectal cancer, endometrial cancer, kidney cancer, renal cell cancer, renal pelvis cancer, leukemia, lung cancer, melanoma, non-Hodgkin's lymphoma, pancreatic cancer, prostate cancer, ovarian cancer, fibrosarcoma, acute lymphoblastic leukemia (ALL), acute myeloid leukemia (AML), chronic lymphocytic leukemia (CLL), chronic myeloid leukemia (CML), multiple myeloma, polycythemia vera, essential thrombocytosis, primary or idiopathic myelofibrosis, primary or idiopathic myelosclerosis, myeloid-derived tumors, tumors that express TREM2 and/or TREM2 ligands, thyroid cancer, infections, CNS herpes, parasitic infections, Trypanosome infection, Cruzi infection, Pseudomonas aeruginosa infection, Leishmania donovani infection, group B Streptococcus infection, Campylobacter jejuni infection, Neisseria meningiditis infection, type I HIV, and Haemophilus influenza. The methods provided herein also find use in inducing or promoting the survival, maturation, functionality, migration, or proliferation of one or more immune cells in an individual in need thereof. The methods provided herein find further use in decreasing the activity, functionality, or survival of regulatory T cells, tumor-imbedded immunosuppressor dendritic cells, tumor-imbedded immunosuppressor macrophages, neutrophils, natural killer (NK) cells, myeloid-derived suppressor cells, tumor-associated macrophages, neutrophils, NK cells, acute myeloid leukemia (AML) cells, chronic lymphocytic leukemia (CLL) cell, or chronic myeloid leukemia (CML) cell in an individual in need thereof

[0024] In some embodiments, tumor cells, such as acute myeloblastic leukemia (AML) cell, express TREM2. Accordingly, anti-TREM2 antibodies of the present disclosure also find use in treating cancers. In some embodiments, anti-TREM2 antibodies, including antibodies that display antibody-dependent cell-mediated cytotoxicity (ADCC) and/or TREM2 antibody drug conjugates, can be used to target and inhibit cancer, such as AML.

[0025] Certain aspects of the present disclosure are based, at least in part, on the identification of two distinct classes of isolated antibodies that specifically bind to and modulate TREM2 proteins.

[0026] One class of antibodies relates to agonist antibodies that induce one or more TREM2 activities on, for example, human primary immune cells and TREM2-expressing cell lines, and when combined with one or more TREM2 ligands enhance one or more TREM2 activities induced by binding of the one or more TREM2 ligands to the TREM2 protein. Advantageously, such agonist anti-TREM2 antibodies can enhance ligand-induced TREM2 activity without competing with our otherwise blocking binding of the one or more TREM2 ligands to the TREM2 protein. In some embodiments, the agonist antibodies can activate and/or enhance the one or more TREM2 activities regardless of whether the antibodies are clustered or in solution. In some embodiments, the agonist antibodies can activate TREM2 in solution without the need to be clustered by secondary antibodies, by Fc receptors, or by binding to plates. In some embodiments, the agonist antibodies may activate TREM2 regardless of whether the mechanism for antibody clustering are present at the therapeutic site of action in vivo. In some embodiments, the agonist antibodies may have increased safety and efficacy. In some embodiments, the agonist antibodies can ensure that immune cells that express TREM2 will act primarily in the location where they are required for therapeutic efficacy and will be able to interact with their physiological targets. In some embodiments, the agonist antibodies do not block TREM2 activity that leads to increased disease risks similar to those observed with genetic mutations that reduce TREM2 activity.

[0027] The second class of antibodies relates to antagonist antibodies that specifically bind to and inhibit TREM2, and are incapable of activating TREM2 regardless of whether the antibodies are clustered or in solution. In some embodiments, the antagonist antibodies have increases safety and efficacy. In some embodiments, the antagonist antibodies are incapable of activating TREM2 regardless of their configuration or their ability to cluster.

[0028] Accordingly, certain aspects of the present disclosure relate to an isolated (e.g., monoclonal) antibody that binds to a TREM2 protein, wherein the antibody induces one or more TREM2 activities and enhances one or more TREM2 activities induced by binding of one or more TREM2 ligands to the TREM2 protein. In some embodiments, the antibody enhances one or more TREM2 activities induced by binding of one or more TREM2 ligands to the TREM2 protein, as compared to the one or more TREM2 activities induced by binding of the one or more TREM2 ligands to the TREM2 protein in the absence of the isolated antibody. In some embodiments, the antibody enhances the one or more TREM2 activities without blocking binding of the one or more TREM2 ligands to the TREM2 protein. In some embodiments, the antibody does not compete with the one or more TREM2 ligands for binding to the TREM2 protein. In some embodiments, the antibody enhances binding of the one or more TREM2 ligands to the TREM2 protein.

[0029] Other aspects of the present disclosure relate to an isolated (e.g., monoclonal) antibody that binds to a TREM2 protein, wherein the antibody induces one or more TREM2 activities without blocking binding of one or more TREM2 ligands to the TREM2 protein. In some embodiments, the antibody does not compete with the one or more TREM2 ligands for binding to the TREM2 protein. In some embodiments, the antibody enhances binding of the one or more TREM2 ligands to the TREM2 protein. In some embodiments, the antibody enhances one or more TREM2 activities induced by binding of the one or more TREM2 ligands to the TREM2 protein. In some embodiments, the antibody enhances one or more TREM2 activities induced by binding of the one or more TREM2 ligands to the TREM2 protein, as compared to the one or more TREM2 activities induced by binding of the one or more TREM2 ligands to the TREM2 protein in the absence of the isolated antibody.

[0030] In some embodiments that may be combined with any of the preceding embodiments, the antibody synergizes with the one or more TREM2 ligands to enhance the one or more TREM2 activities. In some embodiments that may be combined with any of the preceding embodiments, the antibody synergizes with the one or more TREM2 ligands to enhance the one or more TREM2 activities. In some embodiments that may be combined with any of the preceding embodiments, the antibody enhances the one or more TREM2 activities in the absence of cell surface clustering of TREM2. In some embodiments that may be combined with any of the preceding embodiments, the antibody enhances the one or more TREM2 activities by inducing or retaining cell surface clustering of TREM2. In some embodiments that may be combined with any of the preceding embodiments, the antibody is clustered by an Fc-gamma receptor expressed on one or more immune cells. In some embodiments that may be combined with any of the preceding embodiments, the one or more immune cells are B cells or microglial cells. In some embodiments that may be combined with any of the preceding embodiments, the enhancement of the one or more TREM2 activities induced by binding of one or more TREM2 ligands to the TREM2 protein is measured on primary cells selected from the group consisting of dendritic cells, bone marrow-derived dendritic cells, monocytes, microglia, macrophages, neutrophils, NK cells, osteoclasts, Langerhans cells of skin, and Kupffer cells, or on cell lines, and wherein the enhancement of the one or more TREM2 activities induced by binding of one or more TREM2 ligands to the TREM2 protein is measured utilizing an in vitro cell assay. In some embodiments that may be combined with any of the preceding embodiments, the antibody increases levels of soluble TREM2, increases half-life of soluble TREM2, or both. In some embodiments that may be combined with any of the preceding embodiments, the levels of soluble TREM2 are selected from the group consisting of serum levels of TREM2, cerebral spinal fluid (CSF) levels of TREM2, tissue levels of TREM2, and any combination thereof. In some embodiments that may be combined with any of the preceding embodiments, the antibody does not bind to soluble TREM2. In some embodiments that may be combined with any of the preceding embodiments, the antibody does not bind to soluble TREM2 in vivo. In some embodiments that may be combined with any of the preceding embodiments, the soluble TREM2 corresponds to amino acid residues selected from the group consisting of amino acid residues 19-160 of SEQ ID NO: 1, amino acid residues 19-159 of SEQ ID NO: 1, amino acid residues 19-158 of SEQ ID NO: 1, amino acid residues 19-157 of SEQ ID NO: 1, amino acid residues 19-156 of SEQ ID NO: 1, amino acid residues 19-155 of SEQ ID NO: 1, and amino acid residues 19-154 of SEQ ID NO: 1. In some embodiments that may be combined with any of the preceding embodiments, the antibody decreases levels of TREM2 in one or more cells. In some embodiments that may be combined with any of the preceding embodiments, the antibody decreases cell surface levels of TREM2, decreases intracellular levels of TREM2, decreases total levels of TREM2, or any combination thereof. In some embodiments that may be combined with any of the preceding embodiments, the antibody induces TREM2 degradation, TREM2 cleavage, TREM2 internalization, TREM2 shedding, downregulation of TREM2 expression, or any combination thereof. In some embodiments that may be combined with any of the preceding embodiments, the levels of TREM2 in one or more cells are measured in primary cells selected from the group consisting of dendritic cells, bone marrow-derived dendritic cells, monocytes, microglia, macrophages, neutrophils, NK cells, osteoclasts, Langerhans cells of skin, and Kupffer cells, or on cell lines, and wherein the cellular levels of TREM2 are measured utilizing an in vitro cell assay. In some embodiments that may be combined with any of the preceding embodiments, the TREM2 protein is a mammalian, such as a non-human mammal, protein or a human protein. In some embodiments that may be combined with any of the preceding embodiments, the TREM2 protein is a wild-type protein. In some embodiments that may be combined with any of the preceding embodiments, the TREM2 protein is a naturally occurring variant. In some embodiments that may be combined with any of the preceding embodiments, the TREM2 protein is expressed on human dendritic cells, human macrophages, human monocytes, human osteoclasts, human Langerhans cells of skin, human Kupffer cells, human microglia, or any combination thereof. In some embodiments that may be combined with any of the preceding embodiments, the one or more TREM2 activities are selected from the group consisting of: (a) TREM2 binding to DAP12; (b) TREM2 phosphorylation; (c) DAP12 phosphorylation; (d) activation of one or more tyrosine kinases, optionally wherein the one or more tyrosine kinases comprise a Syk kinase, ZAP70 kinase, or both; (e) activation of phosphatidylinositol 3-kinase (PI3K); (0 activation of protein kinase B (Akt); (g) recruitment of phospholipase C-gamma (PLC-gamma) to a cellular plasma membrane, activation of PLC-gamma, or both; (h) recruitment of TEC-family kinase dVav to a cellular plasma membrane; (i) activation of nuclear factor-rB (NF-rB); (j) inhibition of MAPK signaling; (k) phosphorylation of linker for activation of T cells (LAT), linker for activation of B cells (LAB), or both; (1) activation of IL-2-induced tyrosine kinase (Itk); (m) modulation of one or more pro-inflammatory mediators selected from the group consisting of IFN-β, IL-1α, IL-1β, TNF-α, IL-6, IL-8, CRP, CD86, MCP-1/CCL2, CCL3, CCL4, CCL5, CCR2, CXCL-10, Gata3, IL-20 family members, IL-33, LIF, IFN-gamma, OSM, CNTF, CSF-1, OPN, CD11c, GM-CSF, IL-11, IL-12, IL-17, IL-18, and IL-23, optionally wherein the modulation occurs in one or more cells selected from the group consisting of macrophages, M1 macrophages, activated M1 macrophages, M2 macrophages, dendritic cells, monocytes, osteoclasts, Langerhans cells of skin, Kupffer cells, and microglial cells; (n) modulation of one or more anti-inflammatory mediators selected from the group consisting of IL-4, IL-10 TGF-β, IL-13, IL-35 IL-16, IFN-alpha, IL-1Ra, VEGF, G-CSF, YM, AXL, FLT1, and soluble receptors for TNF or IL-6, optionally wherein the modulation occurs in one or more cells selected from the group consisting of macrophages, M1 macrophages, activated M1 macrophages, M2 macrophages, dendritic cells, monocytes, osteoclasts, Langerhans cells of skin, Kupffer cells, and microglial cells; (o) modulation of one or more genes whose expression is increased upon induction of inflammation, optionally wherein the one or more genes are selected from the group consisting of Fabp3, Fabp5, and LDR; (p) phosphorylation of extracellular signal-regulated kinase (ERK); (q) modulated expression of C—C chemokine receptor 7 (CCR7) in one or more cells selected from the group consisting of macrophages, M1 macrophages, activated M1 macrophages, M2 macrophages, dendritic cells, monocytes, osteoclasts, Langerhans cells of skin, Kupffer cells, microglia, M1 microglia, activated M1 microglia, and M2 microglia, and any combination thereof; (r) induction of microglial cell chemotaxis toward CCL19 and CCL21 expressing cells; (s) normalization of disrupted TREM2/DAP12-dependent gene expression; (t) recruitment of Syk, ZAP70, or both to a DAP12/TREM2 complex; (u) increasing activity of one or more TREM2-dependent genes, optionally wherein the one or more TREM2-dependent genes comprise nuclear factor of activated T-cells (NFAT) transcription factors; (v) increased maturation of dendritic cells, monocytes, microglia, M1 microglia, activated M1 microglia, and M2 microglia, macrophages, M1 macrophages, activated M1 macrophages, M2 macrophages, or any combination thereof; (w) increased ability of dendritic cells, monocytes, microglia, M1 microglia, activated M1 microglia, and M2 microglia, macrophages, M1 macrophages, activated M1 macrophages, M2 macrophages, or any combination thereof to prime or modulate the function of T cells, optionally wherein the T cells are one or more cells selected from the group consisting of CD8+ T cells, CD4+ T cells regulatory T cells, and any combination thereof; (x) enhanced ability, normalized ability, or both of bone marrow-derived dendritic cells to prime or modulate function of antigen-specific T cells, optionally wherein the antigen-specific T cells are one or more cells selected from the group consisting of CD8+ T cells, CD4+ T cells regulatory T cells, and any combination thereof; (y) enhanced ability, normalized ability, or both of bone marrow-derived dendritic cells to induce antigen-specific T-cell proliferation; (z) induction of osteoclast production, increased rate of osteoclastogenesis, or both; (aa) increased survival of dendritic cells, macrophages, M1 macrophages, activated M1 macrophages, M2 macrophages, monocytes, osteoclasts, Langerhans cells of skin, Kupffer cells, microglia, M1 microglia, activated M1 microglia, and M2 microglia, or any combination thereof; (bb) increasing the function of dendritic cells, macrophages, M1 macrophages, activated M1 macrophages, M2 macrophages, microglia, M1 microglia, activated M1 microglia, and M2 microglia, or any combination thereof; (cc) increasing phagocytosis by dendritic cells, macrophages, M1 macrophages, activated M1 macrophages, M2 macrophages, monocytes, microglia, M1 microglia, activated M1 microglia, and M2 microglia, or any combination thereof; (dd) induction of one or more types of clearance selected from the group consisting of apoptotic neuron clearance, nerve tissue debris clearance, non-nerve tissue debris clearance, bacteria or other foreign body clearance, disease-causing agent clearance, tumor cell clearance, or any combination thereof, optionally wherein the disease-causing agent is selected from the group consisting of amyloid beta or fragments thereof, Tau, IAPP, alpha-synuclein, TDP-43, FUS protein, prion protein, PrPSc, huntingtin, calcitonin, superoxide dismutase, ataxin, Lewy body, atrial natriuretic factor, islet amyloid polypeptide, insulin, apolipoprotein AI, serum amyloid A, medin, prolactin, transthyretin, lysozyme, beta 2 microglobulin, gelsolin, keratoepithelin, cystatin, immunoglobulin light chain AL, S-IBM protein, and Repeat-associated non-ATG (RAN) translation products including DiPeptide Repeats, (DPRs peptides) composed of glycine-alanine (GA), glycine-proline (GP), glycine-arginine (GR), proline-alanine (PA), or proline-arginine (PR), antisense GGCCCC (G2C4) repeat-expansion RNA; (ee) induction of phagocytosis of one or more of apoptotic neurons, nerve tissue debris, non-nerve tissue debris, bacteria, other foreign bodies, disease-causing agents, tumor cells, or any combination thereof, optionally wherein the disease-causing agent is selected from the group consisting of amyloid beta or fragments thereof, Tau, IAPP, alpha-synuclein, TDP-43, FUS protein, prion protein, PrPSc, huntingtin, calcitonin, superoxide dismutase, ataxin, Lewy body, atrial natriuretic factor, islet amyloid polypeptide, insulin, apolipoprotein AI, serum amyloid A, medin, prolactin, transthyretin, lysozyme, beta 2 microglobulin, gelsolin, keratoepithelin, cystatin, immunoglobulin light chain AL, S-IBM protein, and Repeat-associated non-ATG (RAN) translation products including DiPeptide Repeats, (DPRs peptides) composed of glycine-alanine (GA), glycine-proline (GP), glycine-arginine (GR), proline-alanine (PA), or proline-arginine (PR), antisense GGCCCC (G2C4) repeat-expansion RNA; (ff) modulated expression of one or more stimulatory molecules selected from the group consisting of CD83, CD86 MHC class II. CD40, and any combination thereof, optionally wherein the CD40 is expressed on dendritic cells, monocytes, macrophages, or any combination thereof, and optionally wherein the dendritic cells comprise bone marrow-derived dendritic cells; (gg) modulating secretion of one or more pro-inflammatory mediators selected from the group consisting of IFN-β, IL-1α, IL-1β, CD86, TNF-α, IL-6, IL-8, CRP, MCP-1/CCL2, CCL3, CCL4, CCL5, CCR2, CXCL-10, Gata3, IL-20 family members, IL-33, LIF, IFN-gamma, OSM, CNTF, CSF-1, OPN, CD11c, GM-CSF, IL-11, IL-12, IL-17, IL-18, and IL-23, and optionally wherein the modulation occurs in one or more cells selected from the group consisting of macrophages, M1 macrophages, activated M1 macrophages, M2 macrophages, dendritic cells, monocytes, osteoclasts, Langerhans cells of skin, Kupffer cells, and microglial cells; (hh) modulating secretion of one or more anti-inflammatory mediators selected from the group consisting of IL-4, IL-10 TGF-β, IL-13, IL-35 IL-16, IFN-alpha, IL-1Ra, VEGF, G-CSF, YM, AXL, FLT1, and soluble receptors for TNF or IL-6, and optionally wherein the modulation occurs in one or more cells selected from the group consisting of macrophages, M1 macrophages, activated M1 macrophages, M2 macrophages, dendritic cells, monocytes, osteoclasts, Langerhans cells of skin, Kupffer cells, and microglial cells; (ii) modulating expression of one or more proteins selected from the group consisting of C1qa, C1qB, C1qC, C1s, C1R, C4, C2, C3, ITGB2, HMOX1, LAT2. CASP1, CSTA, VSIG4, MS4A4A, C3AR1, GPX1, TyroBP, ALOXSAP, ITGAM, SLC7A7, CD4, ITGAX, PYCARD, and VEGF; (jj) increasing memory; and (kk) reducing cognitive deficit. In some embodiments that may be combined with any of the preceding embodiments, the one or more TREM2 activities are selected from the group consisting of: (a) TREM2 binding to DAP12; (b) DAP12 phosphorylation; (c) activation of Syk kinase; (d) modulation of one or more pro-inflammatory mediators selected from the group consisting of IFN-β, IL-1α, IL-1β, TNF-α, IL-6, IL-8, CRP, CD86, MCP-1/CCL2, CCL3, CCL4, CCL5, CCR2, CXCL-10, Gata3, IL-20 family members, IL-33, LIF, IFN-gamma, OSM, CNTF, CSF-1, OPN, CD11c, GM-CSF, IL-11, IL-12, IL-17, IL-18, and IL-23, optionally wherein the modulation occurs in one or more cells selected from the group consisting of macrophages, M1 macrophages, activated M1 macrophages, M2 macrophages, dendritic cells, monocytes, osteoclasts, Langerhans cells of skin, Kupffer cells, and microglial cells; (e) recruitment of Syk to a DAP12/TREM2 complex; (f) increasing activity of one or more TREM2-dependent genes, optionally wherein the one or more TREM2-dependent genes comprise nuclear factor of activated T-cells (NFAT) transcription factors; (g) increased survival of dendritic cells, macrophages, M1 macrophages, activated M1 macrophages, M2 macrophages, monocytes, osteoclasts, Langerhans cells of skin, Kupffer cells, microglia, M1 microglia, activated M1 microglia, and M2 microglia, or any combination thereof; (h) modulated expression of one or more stimulatory molecules selected from the group consisting of CD83, CD86 MHC class II, CD40, and any combination thereof, optionally wherein the CD40 is expressed on dendritic cells, monocytes, macrophages, or any combination thereof, and optionally wherein the dendritic cells comprise bone marrow-derived dendritic cells; (i) increasing memory; and (j) reducing cognitive deficit. In some embodiments that may be combined with any of the preceding embodiments, the antibody is of the IgG class the IgM class, or the IgA class. In some embodiments that may be combined with any of the preceding embodiments, the antibody is of the IgG class and has an IgG1, IgG2, IgG3, or IgG4 isotype. In some embodiments that may be combined with any of the preceding embodiments, the antibody has an IgG2 isotype. In some embodiments that may be combined with any of the preceding embodiments, the antibody comprises a human IgG2 constant region. In some embodiments that may be combined with any of the preceding embodiments, the human IgG2 constant region comprises an Fc region. In some embodiments that may be combined with any of the preceding embodiments, the antibody enhances the one or more TREM2 activities independently of binding to an Fc receptor. In some embodiments that may be combined with any of the preceding embodiments, the antibody binds an inhibitory Fc receptor. In some embodiments that may be combined with any of the preceding embodiments, the inhibitory Fc receptor is inhibitory Fc-gamma receptor IIB (FcγIIB). In some embodiments that may be combined with any of the preceding embodiments: (a) the isolated antibody has a human or mouse IgG1 isotype and comprises one or more amino acid substitutions in the Fc region at a residue position selected from the group consisting of: N297A, D265A, D270A, L234A, L235A, G237A, C226S, C229S, E233P, L234V, L234F, L235E, P331S, S267E, L328F, A330L, M252Y, S254T, T256E, L328E, P238D, S267E, L328F, E233D, G237D, H268D, P271G, A330R, and any combination thereof, wherein the numbering of the residues is according to EU numbering, or comprises an amino acid deletion in the Fc region at a position corresponding to glycine 236; (b) the isolated antibody has an IgG1 isotype and comprises an IgG2 isotype heavy chain constant domain 1(CH1) and hinge region, optionally wherein the IgG2 isotype CH1 and hinge region comprises the amino acid sequence of ASTKGPSVFP LAPCSRSTSE STAALGCLVK DYFPEPVTVS WNSGALTSGVHTFPAVLQSS GLYSLSSVVT VPSSNFGTQT YTCNVDHKPS NTKVDKTVERKCCVECPPCP (SEQ ID NO: 886), and optionally wherein the antibody Fc region comprises a S267E amino acid substitution, a L328F amino acid substitution, or both, and/or a N297A or N297Q amino acid substitution, wherein the numbering of the residues is according to EU numbering; (c) the isolated antibody has an IgG2 isotype and comprises one or more amino acid substitutions in the Fc region at a residue position selected from the group consisting of: P238S, V234A, G237A, H268A, H268Q, V309L, A330S, P331S, C214S, C232S, C233S, S267E, L328F, M252Y, S254T, T256E, H268E, N297A, N297Q, A330L, and any combination thereof, wherein the numbering of the residues is according to EU numbering; (d) the a isolated antibody has a human or mouse IgG4 isotype and comprises one or more amino acid substitutions in the Fc region at a residue position selected from the group consisting of: L235A, G237A, S228P, L236E, S267E, E318A, L328F, M252Y, S254T, T256E, E233P, F234V, L234A/F234A, S228P, S241P, L248E, T394D, N297A, N297Q, L235E, and any combination thereof, wherein the numbering of the residues is according to EU numbering; or (e) the isolated antibody has a hybrid IgG2/4 isotype, and optionally wherein the antibody comprises an amino acid sequence comprising amino acids 118 to 260 of human IgG2 and amino acids 261 to 447 of human IgG4, wherein the numbering of the residues is according to EU or numbering. In some embodiments that may be combined with any of the preceding embodiments, the antibody has an IgG4 isotype. In some embodiments that may be combined with any of the preceding embodiments, the antibody comprises an S228P amino acid substitution at residue position 228, an F234A amino acid substitution at residue position 234, and an L235A amino acid substitution at residue position 235, wherein the numbering of the residue position is according to EU numbering.

[0031] In some embodiments that may be combined with any of the preceding embodiments, the antibody binds to one or more amino acids within amino acid residues selected from the group consisting of: (i) amino acid residues 19-174 of SEQ ID NO: 1, or amino acid residues on a TREM2 protein corresponding to amino acid residues 19-174 of SEQ ID NO: 1; (ii) amino acid residues 29-112 of SEQ ID NO: 1, or amino acid residues on a TREM2 protein corresponding to amino acid residues 29-112 of SEQ ID NO: 1; (iii) amino acid residues 113-174 of SEQ ID NO: 1, or amino acid residues on a TREM2 protein corresponding to amino acid residues 113-174 of SEQ ID NO: 1; (iv) amino acid residues 35-49 of SEQ ID NO: 1, or amino acid residues on a TREM2 protein corresponding to amino acid residues 35-49 of SEQ ID NO: 1; (v) amino acid residues 35-49 and 140-150 of SEQ ID NO: 1, or amino acid residues on a TREM2 protein corresponding to amino acid residues 35-49 and 140-150 of SEQ ID NO: 1; (vi) amino acid residues 39-49 of SEQ ID NO: 1, or amino acid residues on a TREM2 protein corresponding to amino acid residues 39-49 of SEQ ID NO: 1; (vii) amino acid residues 39-49 and 63-77 of SEQ ID NO: 1, or amino acid residues on a TREM2 protein corresponding to amino acid residues 39-49 and 63-77 of SEQ ID NO: 1; (viii) amino acid residues 51-61 of SEQ ID NO: 1, or amino acid residues on a TREM2 protein corresponding to amino acid residues 51-61 of SEQ ID NO: 1; (ix) amino acid residues 55-62 of SEQ ID NO: 1, or amino acid residues on a TREM2 protein corresponding to amino acid residues 55-62 of SEQ ID NO: 1; (x) amino acid residues 55-62, 104-109, and 148-158 of SEQ ID NO: 1, or amino acid residues on a TREM2 protein corresponding to amino acid residues 55-62, 104-109, and 148-158 of SEQ ID NO: 1; (xi) amino acid residues 55-62, 104-109, and 160-166 of SEQ ID NO: 1, or amino acid residues on a TREM2 protein corresponding to amino acid residues 55-62, 104-109, and 160-166 of SEQ ID NO: 1; (xii) amino acid residues 55-65 of SEQ ID NO: 1, or amino acid residues on a TREM2 protein corresponding to amino acid residues 55-65 of SEQ ID NO: 1; (xiii) amino acid residues 55-65 and 124-134 of SEQ ID NO: 1, or amino acid residues on a TREM2 protein corresponding to amino acid residues 55-65 and 124-134 of SEQ ID NO: 1; (xiv) amino acid residues 63-73 of SEQ ID NO: 1, or amino acid residues on a TREM2 protein corresponding to amino acid residues 63-73 of SEQ ID NO: 1; (xv) amino acid residues 63-77 of SEQ ID NO: 1, or amino acid residues on a TREM2 protein corresponding to amino acid residues 63-77 of SEQ ID NO: 1; (xvi) amino acid residues 104-109 of SEQ ID NO: 1, or amino acid residues on a TREM2 protein corresponding to amino acid residues 104-109 of SEQ ID NO: 1; (xvii) amino acid residues 117-133 of SEQ ID NO: 1, or amino acid residues on a TREM2 protein corresponding to amino acid residues 117-133 of SEQ ID NO: 1; (xviii) amino acid residues 124-134 of SEQ ID NO: 1, or amino acid residues on a TREM2 protein corresponding to amino acid residues 124-134 of SEQ ID NO: 1; (xix) amino acid residues 137-146 of SEQ ID NO: 1, or amino acid residues on a TREM2 protein corresponding to amino acid residues 137-146 of SEQ ID NO: 1; (xx) amino acid residues 139-147 of SEQ ID NO: 1, or amino acid residues on a TREM2 protein corresponding to amino acid residues 139-147 of SEQ ID NO: 1; (xxi) amino acid residues 139-149 of SEQ ID NO: 1, or amino acid residues on a TREM2 protein corresponding to amino acid residues 139-149 of SEQ ID NO: 1; (xxii) amino acid residues 140-150 of SEQ ID NO: 1, or amino acid residues on a TREM2 protein corresponding to amino acid residues 140-150 of SEQ ID NO: 1; (xxiii) amino acid residues 140-146 of SEQ ID NO: 1, or amino acid residues on a TREM2 protein corresponding to amino acid residues 140-146 of SEQ ID NO: 1; (xxiv) amino acid residues 140-143 of SEQ ID NO: 1, or amino acid residues on a TREM2 protein corresponding to amino acid residues 140-143 of SEQ ID NO: 1; (xxv) amino acid residues 142-152 of SEQ ID NO: 1, or amino acid residues on a TREM2 protein corresponding to amino acid residues 142-152 of SEQ ID NO: 1; (xxvi) amino acid residues 146-154 of SEQ ID NO: 1, or amino acid residues on a TREM2 protein corresponding to amino acid residues 146-154 of SEQ ID NO: 1; (xxvii) amino acid residues 148-158 of SEQ ID NO: 1, or amino acid residues on a TREM2 protein corresponding to amino acid residues 148-158 of SEQ ID NO: 1; (xxviii) amino acid residues 149-157 of SEQ ID NO: 1, or amino acid residues on a TREM2 protein corresponding to amino acid residues 149-157 of SEQ ID NO: 1; (xxix) amino acid residues 149 and 150 of SEQ ID NO: 1, or amino acid residues on a TREM2 protein corresponding to amino acid residues 149 and 150 of SEQ ID NO: 1; (xxx) amino acid residues 151-155 of SEQ ID NO: 1, or amino acid residues on a TREM2 protein corresponding to amino acid residues 151-155 of SEQ ID NO: 1; (xxxi) amino acid residues 154-161 of SEQ ID NO: 1, or amino acid residues on a TREM2 protein corresponding to amino acid residues 154-161 of SEQ ID NO: 1; (xxxii) amino acid residues 156-170 of SEQ ID NO: 1, or amino acid residues on a TREM2 protein corresponding to amino acid residues 156-170 of SEQ ID NO: 1; (xxxiii) amino acid residues 160-166 of SEQ ID NO: 1, or amino acid residues on a TREM2 protein corresponding to amino acid residues 160-166 of SEQ ID NO: 1; and (xxxiv) amino acid residues 162-165 of SEQ ID NO: 1, or amino acid residues on a TREM2 protein corresponding to amino acid residues 162-165 of SEQ ID NO: 1. In some embodiments that may be combined with any of the preceding embodiments, the antibody binds to one or more amino acid residues selected from the group consisting of K42, H43, W44, G45, H67, R77, T88, H114, E117, E151, D152, H154, and E156 of SEQ ID NO: 1, or one or more amino acid residues on a mammalian TREM2 protein corresponding to an amino acid residue selected from the group consisting of K42, H43, W44, G45, H67, R77, T88, H114, E117, E151, D152, H154, and E156 of SEQ ID NO: 1. In some embodiments that may be combined with any of the preceding embodiments, the antibody binds to one or more amino acid residues selected from the group consisting of E151, D152, H154, and E156 of SEQ ID NO: 1, or one or more amino acid residues on a mammalian TREM2 protein corresponding to an amino acid residue selected from the group consisting of E151, D152, H154, and E156 of SEQ ID NO: 1. In some embodiments that may be combined with any of the preceding embodiments, the antibody competes with one or more antibodies selected from the group consisting of 3B10, 7B3, 8F8, 9F5, 9G1, 9G3, 11A8, 12F9, 7E9, 7F6, 8C3, 2C5, 3C5, 4C12, 7D9, 2F6, 3A7, 7E5, 11H5, 1B4, 6H2, 7B11, 18D8, 18E4, 29F6, 40D5, 43B9, 44A8, 44B4, and any combination thereof for binding to TREM2.

[0032] In some embodiments that may be combined with any of the preceding embodiments, the antibody comprises a light chain variable domain and a heavy chain variable domain, wherein the light chain variable domain, or the heavy chain variable domain, or both comprise at least one, two, three, four, five, or six HVRs selected from HVR-L1, HVR-L2, HVR-L3, HVR-H1, HVR-H2, and HVR-H3 of an antibody selected from the group consisting of: 4D11, 7C5, 6G12, 8F11, 8E10, 7E5, 7F8, 8F8, 1H7, 2H8, 3A2, 3A7, 3B10, 4F11, 6H6, 7A9, 7B3, 8A1, 9F5, 9G1, 9G3, 10A9, 11A8, 12D9, 12F9, 10C1, 7E9, 7F6, 8C3, 2C5, 3C5, 4C12, 7D9, 2F6, 11H5, B4, 6H2, 7B11v1, 7B11v2, 18D8, 18E4v1, 18E4v2, 29F6v1, 29F6v2, 40D5v1, 40D5v2, 43B9, 44A8v1, 44A8v2, 44B4v1, and 44B4v2. In some embodiments that may be combined with any of the preceding embodiments: (a) the HVR-L1 comprises an amino acid sequence selected from the group consisting of SEQ ID NOs: 9-23, 581, 690-694, 734-738, and 826-828; (b) the HVR-L2 comprises an amino acid sequence selected from the group consisting of SEQ ID NOs: 24-33, 695-697, and 739-743; (c) the HVR-L3 comprises an amino acid sequence selected from the group consisting of SEQ ID NOs: 34-47, 582, 583, 698-702, and 744-746; (d) the HVR-H1 comprises an amino acid sequence selected from the group consisting of SEQ ID NOs: 48-65, 584, 703-705, 747-754, and 829-835; (e) the HVR-H2 comprises an amino acid sequence selected from the group consisting of SEQ ID NOs: 66-84, 585-587, 706-708, 755-762, 836-842, and 888; or (f) the HVR-H3 comprises an amino acid sequence selected from the group consisting of SEQ ID NOs: 85-102, 588, 589, 709, 710, and 763-770. In some embodiments that may be combined with any of the preceding embodiments: (a) the HVR-L1 comprises the amino acid sequence of SEQ ID NO: 11, the HVR-L2 comprises the amino acid sequence of SEQ ID NO: 26, the HVR-L3 comprises the amino acid sequence of SEQ ID NO: 36, the HVR-H1 comprises the amino acid sequence of SEQ ID NO: 51, the HVR-H2 comprises the amino acid sequence of SEQ ID NO: 69, and the HVR-H3 comprises the amino acid sequence of SEQ ID NO: 88; (b) the HVR-L1 comprises the amino acid sequence of SEQ ID NO: 14, the HVR-L2 comprises the amino acid sequence of SEQ ID NO: 28, the HVR-L3 comprises the amino acid sequence of SEQ ID NO: 39, the HVR-H1 comprises the amino acid sequence of SEQ ID NO: 53, the HVR-H2 comprises the amino acid sequence of SEQ ID NO: 71, and the HVR-H3 comprises the amino acid sequence of SEQ ID NO: 90; (c) the HVR-L1 comprises the amino acid sequence of SEQ ID NO: 11, the HVR-L2 comprises the amino acid sequence of SEQ ID NO: 26, the HVR-L3 comprises the amino acid sequence of SEQ ID NO: 36, the HVR-H1 comprises the amino acid sequence of SEQ ID NO: 51, the HVR-H2 comprises the amino acid sequence of SEQ ID NO: 69, and the HVR-H3 comprises the amino acid sequence of SEQ ID NO: 88; (d) the HVR-L1 comprises the amino acid sequence of SEQ ID NO: 16, the HVR-L2 comprises the amino acid sequence of SEQ ID NO: 29, the HVR-L3 comprises the amino acid sequence of SEQ ID NO: 35, the HVR-H1 comprises the amino acid sequence of SEQ ID NO: 55, the HVR-H2 comprises the amino acid sequence of SEQ ID NO: 73, and the HVR-H3 comprises the amino acid sequence of SEQ ID NO: 92; (e) the HVR-H1 comprises the amino acid sequence of SEQ ID NO: 58, the HVR-H2 comprises the amino acid sequence of SEQ ID NO: 76, and the HVR-H3 comprises the amino acid sequence of SEQ ID NO: 95; (f) the HVR-L1 comprises the amino acid sequence of SEQ ID NO: 19, the HVR-L2 comprises the amino acid sequence of SEQ ID NO: 28, the HVR-L3 comprises the amino acid sequence of SEQ ID NO: 43, the HVR-H1 comprises the amino acid sequence of SEQ ID NO: 60, the HVR-H2 comprises the amino acid sequence of SEQ ID NO: 78, and the HVR-H3 comprises the amino acid sequence of SEQ ID NO: 97; (g) the HVR-L1 comprises the amino acid sequence of SEQ ID NO: 20, the HVR-L2 comprises the amino acid sequence of SEQ ID NO: 28, the HVR-L3 comprises the amino acid sequence of SEQ ID NO: 44, the HVR-H1 comprises the amino acid sequence of SEQ ID NO: 61, the HVR-H2 comprises the amino acid sequence of SEQ ID NO: 79, and the HVR-H3 comprises the amino acid sequence of SEQ ID NO: 98; (h) the HVR-L1 comprises the amino acid sequence of SEQ ID NO: 21, the HVR-L2 comprises the amino acid sequence of SEQ ID NO: 32, the HVR-L3 comprises the amino acid sequence of SEQ ID NO: 45, the HVR-H1 comprises the amino acid sequence of SEQ ID NO: 62, the HVR-H2 comprises the amino acid sequence of SEQ ID NO: 80, and the HVR-H3 comprises the amino acid sequence of SEQ ID NO: 99; (i) the HVR-L1 comprises the amino acid sequence of SEQ ID NO: 22, the HVR-L2 comprises the amino acid sequence of SEQ ID NO: 29, the HVR-L3 comprises the amino acid sequence of SEQ ID NO: 46, the HVR-H1 comprises the amino acid sequence of SEQ ID NO: 63, the HVR-H2 comprises the amino acid sequence of SEQ ID NO: 82, and the HVR-H3 comprises the amino acid sequence of SEQ ID NO: 100; or (j) the HVR-L1 comprises the amino acid sequence of SEQ ID NO: 16, the HVR-L2 comprises the amino acid sequence of SEQ ID NO: 29, the HVR-L3 comprises the amino acid sequence of SEQ ID NO: 35, the HVR-H1 comprises the amino acid sequence of SEQ ID NO: 65, the HVR-H2 comprises the amino acid sequence of SEQ ID NO: 84, and the HVR-H3 comprises the amino acid sequence of SEQ ID NO: 102. In some embodiments that may be combined with any of the preceding embodiments, the antibody comprises a light chain variable domain and a heavy chain variable domain, wherein the light chain variable domain comprises: (a) an HVR-L1 comprising an amino acid sequence selected from the group consisting of SEQ ID NOs: 9-23, 581, 690-694, 734-738, and 826-828, or an amino acid sequence with at least about 90% homology to an amino acid sequence selected from the group consisting of SEQ ID NOs: 9-23, 581, 690-694, 734-738, and 826-828; (b) an HVR-L2 comprising an amino acid sequence selected from the group consisting of SEQ ID NOs: 24-33, 695-697, and 739-743, or an amino acid sequence with at least about 90% homology to an amino acid sequence selected from the group consisting of SEQ ID NOs: 24-33, 695-697, and 739-743; and (c) an HVR-L3 comprising an amino acid sequence selected from the group consisting of SEQ ID NOs: 34-47, 582, 583, 698-702, and 744-746, or an amino acid sequence with at least about 90% homology to an amino acid sequence selected from the group consisting of SEQ ID NOs: 34-47, 582, 583, 698-702, and 744-746; and wherein the heavy chain variable domain comprises: (a) an HVR-H1 comprising an amino acid sequence selected from the group consisting of SEQ ID NOs: 48-65, 584, 703-705, 747-754, and 829-835, or an amino acid sequence with at least about 90% homology to an amino acid sequence selected from the group consisting of SEQ ID NOs: 48-65, 584, 703-705, 747-754, and 829-835; (b) an HVR-H2 comprising an amino acid sequence selected from the group consisting of SEQ ID NOs: 66-84, 585-587, 706-708, 755-762, 836-842, and 888, or an amino acid sequence with at least about 90% homology to an amino acid sequence selected from the group consisting of SEQ ID NOs: 66-84, 585-587, 706-708, 755-762, 836-842, and 888; and (c) an HVR-H3 comprising an amino acid sequence selected from the group consisting of SEQ ID NOs: 85-102, 588, 589, 709, 710, and 763-770, or an amino acid sequence with at least about 90% homology to an amino acid sequence selected from the group consisting of SEQ ID NOs: 85-102, 588, 589, 709, 710, and 763-770. In some embodiments that may be combined with any of the preceding embodiments, the antibody comprises a light chain variable domain comprising an amino acid sequence selected from the group consisting of SEQ ID NOs: 219-398, 602-634, 679-689, 724-730, 809-816, 821, 843, 844, 849, and 850; and/or a heavy chain variable domain comprising an amino acid sequence selected from the group consisting of SEQ ID NOs: 399-580, 635-678, 731-733, and 817-820, 822-825, and 845-847. In some embodiments that may be combined with any of the preceding embodiments, the antibody comprises a light chain variable domain and a heavy chain variable domain, wherein: (a) the light chain variable domain comprises the amino acid sequence of SEQ ID NO: 333 and the heavy chain variable domain comprises the amino acid sequence of SEQ ID NO:521; (b) the light chain variable domain comprises the amino acid sequence of SEQ ID NO: 850 and the heavy chain variable domain comprises the amino acid sequence of SEQ ID NO:521; (c) the light chain variable domain comprises the amino acid sequence of SEQ ID NO: 334 and the heavy chain variable domain comprises the amino acid sequence of SEQ ID NO:522; (d) the light chain variable domain comprises the amino acid sequence of SEQ ID NO: 335 and the heavy chain variable domain comprises the amino acid sequence of SEQ ID NO:523; (e) the light chain variable domain comprises the amino acid sequence of SEQ ID NO: 336 and the heavy chain variable domain comprises the amino acid sequence of SEQ ID NO:524; (f) the light chain variable domain comprises the amino acid sequence of SEQ ID NO: 337 and the heavy chain variable domain comprises the amino acid sequence of SEQ ID NO:525; (g) the light chain variable domain comprises the amino acid sequence of SEQ ID NO: 338 and the heavy chain variable domain comprises the amino acid sequence of SEQ ID NO:526; (h) the light chain variable domain comprises the amino acid sequence of SEQ ID NO: 339 and the heavy chain variable domain comprises the amino acid sequence of SEQ ID NO:526; (i) the light chain variable domain comprises the amino acid sequence of SEQ ID NO: 340 and the heavy chain variable domain comprises the amino acid sequence of SEQ ID NO:527; (j) the light chain variable domain comprises the amino acid sequence of SEQ ID NO: 341 and the heavy chain variable domain comprises the amino acid sequence of SEQ ID NO:528; (k) the light chain variable domain comprises the amino acid sequence of SEQ ID NO: 342 and the heavy chain variable domain comprises the amino acid sequence of SEQ ID NO:529; (1) the light chain variable domain comprises the amino acid sequence of SEQ ID NO: 343 and the heavy chain variable domain comprises the amino acid sequence of SEQ ID NO:530; (m) the light chain variable domain comprises the amino acid sequence of SEQ ID NO: 843 and the heavy chain variable domain comprises the amino acid sequence of SEQ ID NO:845; (n) the light chain variable domain comprises the amino acid sequence of SEQ ID NO: 844 and the heavy chain variable domain comprises the amino acid sequence of SEQ ID NO:846; (o) the light chain variable domain comprises the amino acid sequence of SEQ ID NO:844 and the heavy chain variable domain comprises the amino acid sequence of SEQ ID NO:847; (p) the light chain variable domain comprises the amino acid sequence of SEQ ID NO: 219 and the heavy chain variable domain comprises the amino acid sequence of SEQ ID NO:399; (q) the light chain variable domain comprises the amino acid sequence of SEQ ID NO: 230 and the heavy chain variable domain comprises the amino acid sequence of SEQ ID NO:409; (r) the light chain variable domain comprises the amino acid sequence of SEQ ID NO: 252 and the heavy chain variable domain comprises the amino acid sequence of SEQ ID NO:419; (s) the light chain variable domain comprises the amino acid sequence of SEQ ID NO: 241 and the heavy chain variable domain comprises the amino acid sequence of SEQ ID NO:429; (t) the light chain variable domain comprises the amino acid sequence of SEQ ID NO: 849 and the heavy chain variable domain comprises the amino acid sequence of SEQ ID NO:429; (u) the light chain variable domain comprises the amino acid sequence of SEQ ID NO: 263 and the heavy chain variable domain comprises the amino acid sequence of SEQ ID NO:439; (v) the light chain variable domain comprises the amino acid sequence of SEQ ID NO: 274 and the heavy chain variable domain comprises the amino acid sequence of SEQ ID NO:449; (w) the light chain variable domain comprises the amino acid sequence of SEQ ID NO:285 and the heavy chain variable domain comprises the amino acid sequence of SEQ ID NO:459; (x) the light chain variable domain comprises the amino acid sequence of SEQ ID NO:286 and the heavy chain variable domain comprises the amino acid sequence of SEQ ID NO:460; (y) the light chain variable domain comprises the amino acid sequence of SEQ ID NO: 287 and the heavy chain variable domain comprises the amino acid sequence of SEQ ID NO:461; (z) the light chain variable domain comprises the amino acid sequence of SEQ ID NO: 298 and the heavy chain variable domain comprises the amino acid sequence of SEQ ID NO:429; (aa) the light chain variable domain comprises the amino acid sequence of SEQ ID NO:299 and the heavy chain variable domain comprises the amino acid sequence of SEQ ID NO:471; (bb) the light chain variable domain comprises the amino acid sequence of SEQ ID NO: 310 and the heavy chain variable domain comprises the amino acid sequence of SEQ ID NO:461; (cc) the light chain variable domain comprises the amino acid sequence of SEQ ID NO: 679 and the heavy chain variable domain comprises the amino acid sequence of SEQ ID NO:481; (dd) the light chain variable domain comprises the amino acid sequence of SEQ ID NO: 311 and the heavy chain variable domain comprises the amino acid sequence of SEQ ID NO:491; (ee) the light chain variable domain comprises the amino acid sequence of SEQ ID NO: 322 and the heavy chain variable domain comprises the amino acid sequence of SEQ ID NO:511; (ff) the light chain variable domain comprises the amino acid sequence of SEQ ID NO: 344 and the heavy chain variable domain comprises the amino acid sequence of SEQ ID NO:531; (gg) the light chain variable domain comprises the amino acid sequence of SEQ ID NO: 355 and the heavy chain variable domain comprises the amino acid sequence of SEQ ID NO:635; (hh) the light chain variable domain comprises the amino acid sequence of SEQ ID NO: 365 and the heavy chain variable domain comprises the amino acid sequence of SEQ ID NO:541; (ii) the light chain variable domain comprises the amino acid sequence of SEQ ID NO: 376 and the heavy chain variable domain comprises the amino acid sequence of SEQ ID NO:551; (jj) the light chain variable domain comprises the amino acid sequence of SEQ ID NO: 387 and the heavy chain variable domain comprises the amino acid sequence of SEQ ID NO:561; (kk) the light chain variable domain comprises the amino acid sequence of SEQ ID NO: 398 and the heavy chain variable domain comprises the amino acid sequence of SEQ ID NO:571; (11) the light chain variable domain comprises the amino acid sequence of SEQ ID NO: 724 and the heavy chain variable domain comprises the amino acid sequence of SEQ ID NO:731; (mm) the light chain variable domain comprises the amino acid sequence of SEQ ID NO: 809 and the heavy chain variable domain comprises the amino acid sequence of SEQ ID NO:731; (nn) the light chain variable domain comprises the amino acid sequence of SEQ ID NO: 725 and the heavy chain variable domain comprises the amino acid sequence of SEQ ID NO:732; (oo) the light chain variable domain comprises the amino acid sequence of SEQ ID NO: 726 and the heavy chain variable domain comprises the amino acid sequence of SEQ ID NO:731; (pp) the light chain variable domain comprises the amino acid sequence of SEQ ID NO: 726 and the heavy chain variable domain comprises the amino acid sequence of SEQ ID NO:817; (qq) the light chain variable domain comprises the amino acid sequence of SEQ ID NO: 727 and the heavy chain variable domain comprises the amino acid sequence of SEQ ID NO:731; (rr) the light chain variable domain comprises the amino acid sequence of SEQ ID NO: 728 and the heavy chain variable domain comprises the amino acid sequence of SEQ ID NO:733; (ss) the light chain variable domain comprises the amino acid sequence of SEQ ID NO:810 and the heavy chain variable domain comprises the amino acid sequence of SEQ ID NO:818; (tt) the light chain variable domain comprises the amino acid sequence of SEQ ID NO:811 and the heavy chain variable domain comprises the amino acid sequence of SEQ ID NO:733; (uu) the light chain variable domain comprises the amino acid sequence of SEQ ID NO:729 and the heavy chain variable domain comprises the amino acid sequence of SEQ ID NO:731; (vv) the light chain variable domain comprises the amino acid sequence of SEQ ID NO:812 and the heavy chain variable domain comprises the amino acid sequence of SEQ ID NO:819; (ww) the light chain variable domain comprises the amino acid sequence of SEQ ID NO:729 and the heavy chain variable domain comprises the amino acid sequence of SEQ ID NO:820; (xx) the light chain variable domain comprises the amino acid sequence of SEQ ID NO: 730 and the heavy chain variable domain comprises the amino acid sequence of SEQ ID NO:731; (yy) the light chain variable domain comprises the amino acid sequence of SEQ ID NO:813 and the heavy chain variable domain comprises the amino acid sequence of SEQ ID NO:731; (zz) the light chain variable domain comprises the amino acid sequence of SEQ ID NO:814 and the heavy chain variable domain comprises the amino acid sequence of SEQ ID NO:822; (aaa) the light chain variable domain comprises the amino acid sequence of SEQ ID NO:815 and the heavy chain variable domain comprises the amino acid sequence of SEQ ID NO:824; or (bbb) the light chain variable domain comprises the amino acid sequence of SEQ ID NO:816 and the heavy chain variable domain comprises the amino acid sequence of SEQ ID NO:825. In some embodiments that may be combined with any of the preceding embodiments, the antibody comprises a light chain variable domain of an antibody selected from the group consisting of: 3B10, 7B3, 8F8, 9F5, 9G1, 9G3, 11A8, 12F9, 7E9, 7F6, 8C3, 2C5, 3C5, 4C12, 7D9, 2F6, 3A7, 7E5, 11H5, 1B4v1, 1B4v2, 6H2, 7B11v1, 7B11v2, 18D8, 18E4v1, 18E4v2, 29F6v1, 29F6v2, 40D5v1, 40D5v2, 43B9, 44A8v1, 44A8v2, 44B4v1, and 44B4v2; and/or a heavy chain variable domain of an antibody selected from the group consisting of: 3B10, 7B3, 8F8, 9F5, 9G1, 9G3, 11A8, 12F9, 7E9, 7F6, 8C3, 2C5, 3C5, 4C12, 7D9, 2F6, 3A7, 77E5, 11H5, 1B4v1, 1B4v2, 6H2, 7B11v1, 7B11v2, 18D8, 18E4v1, 18E4v2, 29F6v1, 29F6v2, 40D5v1, 40D5v2, 43B9, 44A8v1, 44A8v2, 44B4v1, and 44B4v2. In some embodiments that may be combined with any of the preceding embodiments, the anti-TREM2 antibody comprises a light chain variable domain and a heavy chain variable domain, wherein the light chain variable domain comprises HVR-L1, HVR-L2, HVR-L3, the heavy chain variable domain comprises HVR-H1, HVR-H2, and HVR-H3, and wherein the HVR-H3 comprises an amino acid sequence selected from the group consisting of SEQ ID NOs: 85-102, 588, 589, 709, 710, and 763-770, or an amino acid sequence with at least about 90% homology to an amino acid sequence selected from the group consisting of SEQ ID NOs: 85-102, 588, 589, 709, 710, and 763-770.

[0033] Other aspects of the present disclosure relate to an isolated (e.g., monoclonal) antibody that binds to a TREM2 protein, wherein the antibody binds to one or more amino acids within amino acid residues selected from the group consisting of: (i) amino acid residues 19-174 of SEQ ID NO: 1, or amino acid residues on a TREM2 protein corresponding to amino acid residues 19-174 of SEQ ID NO: 1; (ii) amino acid residues 29-112 of SEQ ID NO: 1, or amino acid residues on a TREM2 protein corresponding to amino acid residues 29-112 of SEQ ID NO: 1; (iii) amino acid residues 113-174 of SEQ ID NO: 1, or amino acid residues on a TREM2 protein corresponding to amino acid residues 113-174 of SEQ ID NO: 1; (iv) amino acid residues 35-49 of SEQ ID NO: 1, or amino acid residues on a TREM2 protein corresponding to amino acid residues 35-49 of SEQ ID NO: 1; (v) amino acid residues 35-49 and 140-150 of SEQ ID NO: 1, or amino acid residues on a TREM2 protein corresponding to amino acid residues 35-49 and 140-150 of SEQ ID NO: 1; (vi) amino acid residues 39-49 of SEQ ID NO: 1, or amino acid residues on a TREM2 protein corresponding to amino acid residues 39-49 of SEQ ID NO: 1; (vii) amino acid residues 39-49 and 63-77 of SEQ ID NO: 1, or amino acid residues on a TREM2 protein corresponding to amino acid residues 39-49 and 63-77 of SEQ ID NO: 1; (viii) amino acid residues 51-61 of SEQ ID NO: 1, or amino acid residues on a TREM2 protein corresponding to amino acid residues 51-61 of SEQ ID NO: 1; (ix) amino acid residues 55-62 of SEQ ID NO: 1, or amino acid residues on a TREM2 protein corresponding to amino acid residues 55-62 of SEQ ID NO: 1; (x) amino acid residues 55-62, 104-109, and 148-158 of SEQ ID NO: 1, or amino acid residues on a TREM2 protein corresponding to amino acid residues 55-62, 104-109, and 148-158 of SEQ ID NO: 1; (xi) amino acid residues 55-62, 104-109, and 160-166 of SEQ ID NO: 1, or amino acid residues on a TREM2 protein corresponding to amino acid residues 55-62, 104-109, and 160-166 of SEQ ID NO: 1; (xii) amino acid residues 55-65 of SEQ ID NO: 1, or amino acid residues on a TREM2 protein corresponding to amino acid residues 55-65 of SEQ ID NO: 1; (xiii) amino acid residues 55-65 and 124-134 of SEQ ID NO: 1, or amino acid residues on a TREM2 protein corresponding to amino acid residues 55-65 and 124-134 of SEQ ID NO: 1; (xiv) amino acid residues 63-73 of SEQ ID NO: 1, or amino acid residues on a TREM2 protein corresponding to amino acid residues 63-73 of SEQ ID NO: 1; (xv) amino acid residues 63-77 of SEQ ID NO: 1, or amino acid residues on a TREM2 protein corresponding to amino acid residues 63-77 of SEQ ID NO: 1; (xvi) amino acid residues 104-109 of SEQ ID NO: 1, or amino acid residues on a TREM2 protein corresponding to amino acid residues 104-109 of SEQ ID NO: 1; (xvii) amino acid residues 117-133 of SEQ ID NO: 1, or amino acid residues on a TREM2 protein corresponding to amino acid residues 117-133 of SEQ ID NO: 1; (xviii) amino acid residues 124-134 of SEQ ID NO: 1, or amino acid residues on a TREM2 protein corresponding to amino acid residues 124-134 of SEQ ID NO: 1; (xix) amino acid residues 137-146 of SEQ ID NO: 1, or amino acid residues on a TREM2 protein corresponding to amino acid residues 137-146 of SEQ ID NO: 1; (xx) amino acid residues 139-147 of SEQ ID NO: 1, or amino acid residues on a TREM2 protein corresponding to amino acid residues 139-147 of SEQ ID NO: 1; (xxi) amino acid residues 139-149 of SEQ ID NO: 1, or amino acid residues on a TREM2 protein corresponding to amino acid residues 139-149 of SEQ ID NO: 1; (xxii) amino acid residues 140-150 of SEQ ID NO: 1, or amino acid residues on a TREM2 protein corresponding to amino acid residues 140-150 of SEQ ID NO: 1; (xxiii) amino acid residues 140-146 of SEQ ID NO: 1, or amino acid residues on a TREM2 protein corresponding to amino acid residues 140-146 of SEQ ID NO: 1; (xxiv) amino acid residues 140-143 of SEQ ID NO: 1, or amino acid residues on a TREM2 protein corresponding to amino acid residues 140-143 of SEQ ID NO: 1; (xxv) amino acid residues 142-152 of SEQ ID NO: 1, or amino acid residues on a TREM2 protein corresponding to amino acid residues 142-152 of SEQ ID NO: 1; (xxvi) amino acid residues 146-154 of SEQ ID NO: 1, or amino acid residues on a TREM2 protein corresponding to amino acid residues 146-154 of SEQ ID NO: 1; (xxvii) amino acid residues 148-158 of SEQ ID NO: 1, or amino acid residues on a TREM2 protein corresponding to amino acid residues 148-158 of SEQ ID NO: 1; (xxviii) amino acid residues 149-157 of SEQ ID NO: 1, or amino acid residues on a TREM2 protein corresponding to amino acid residues 149-157 of SEQ ID NO: 1; (xxix) amino acid residues 149 and 150 of SEQ ID NO: 1, or amino acid residues on a TREM2 protein corresponding to amino acid residues 149 and 150 of SEQ ID NO: 1; (xxx) amino acid residues 151-155 of SEQ ID NO: 1, or amino acid residues on a TREM2 protein corresponding to amino acid residues 151-155 of SEQ ID NO: 1; (xxxi) amino acid residues 154-161 of SEQ ID NO: 1, or amino acid residues on a TREM2 protein corresponding to amino acid residues 154-161 of SEQ ID NO: 1; (xxxii) amino acid residues 156-170 of SEQ ID NO: 1, or amino acid residues on a TREM2 protein corresponding to amino acid residues 156-170 of SEQ ID NO: 1; (xxxiii) amino acid residues 160-166 of SEQ ID NO: 1, or amino acid residues on a TREM2 protein corresponding to amino acid residues 160-166 of SEQ ID NO: 1; and (xxxiv) amino acid residues 162-165 of SEQ ID NO: 1, or amino acid residues on a TREM2 protein corresponding to amino acid residues 162-165 of SEQ ID NO: 1. In some embodiments, the antibody induces one or more TREM2 activities and enhances one or more TREM2 activities induced by binding of one or more TREM2 ligands to the TREM2 protein. In some embodiments, the antibody further binds to one or more amino acid residues selected from the group consisting of: (i) amino acid residue Arg47 or Asp87 of SEQ ID NO: 1; (ii) amino acid residues 40-44 of SEQ ID NO: 1; (iii) amino acid residues 67-76 of SEQ ID NO: 1; and (iv) amino acid residues 114-118 of SEQ ID NO: 1.

[0034] Other aspects of the present disclosure relate to an isolated (e.g., monoclonal) antibody that binds to a TREM2 protein, wherein the antibody binds to one or more amino acid residues selected from the group consisting of K42, H43, W44, G45, H67, R77, T88, H114, E117, E151, D152, H154, and E156 of SEQ ID NO: 1, or one or more amino acid residues on a mammalian TREM2 protein corresponding to an amino acid residue selected from the group consisting of K42, H43, W44, G45, H67, R77, T88, H114, E117, E151, D152, H154, and E156 of SEQ ID NO: 1. In some embodiments, the antibody binds to one or more amino acid residues selected from the group consisting of E151, D152, H154, and E156 of SEQ ID NO: 1, or one or more amino acid residues on a mammalian TREM2 protein corresponding to an amino acid residue selected from the group consisting of E151, D152, H154, and E156 of SEQ ID NO: 1. Other aspects of the present disclosure relate to an isolated (e.g., monoclonal) antibody that binds to a TREM2 protein, wherein the antibody binds to one or more amino acid residues selected from the group consisting of E151, D152, H154, and E156 of SEQ ID NO: 1, or one or more amino acid residues on a mammalian TREM2 protein corresponding to an amino acid residue selected from the group consisting of E151, D152, H154, and E156 of SEQ ID NO: 1.

[0035] Other aspects of the present disclosure relate to an isolated (e.g., monoclonal) antibody that binds to a TREM2 protein, wherein the antibody competes with one or more antibodies selected from the group consisting of 1A7, 3A2, 3B10, 6G12, 6H6, 7A9, 7B3, 8A1, 8E10, 8F11, 8F8, 9F5, 9G1, 9G3, 10A9, 10C1, 11A8, 12E2, 12F9, 12G6, 2C7, 2F5, 3C1, 4D7, 4D11, 6C11, 6G12, 7A3, 7C5, 7E9, 7F6, 7G1, 7H1, 8C3, 8F10, 12A1, 1E9, 2C5, 3C5, 4C12, 4F2, 5A2, 6B3, 7D1, 7D9, 11D8, 8A12, 10E7, 10B11, 10D2, 7D5, 2A7, 3G12, 6H9, 8G9, 9B4, 10A1, 11A8, 12F3, 2F8, 10E3, 1H7, 2F6, 2H8, 3A7, 7E5, 7F8, 11H5, 7C5, 4F11, 12D9, 1B4v1, 1B4v2, 6H2, 7B11v1, 7B11v2, 18D8, 18E4v1, 18E4v2, 29F6v1, 29F6v2, 40D5v1, 40D5v2, 43B9, 44A8v1, 44A8v2, 44B4v1, 44B4v2, and any combination thereof for binding to TREM2.

[0036] Other aspects of the present disclosure relate to an isolated (e.g., monoclonal) antibody that binds to a TREM2 protein, wherein the antibody comprises a light chain variable domain and a heavy chain variable domain, wherein the light chain variable domain, or the heavy chain variable domain, or both comprise at least one, two, three, four, five, or six HVRs selected from HVR-L1, HVR-L2, HVR-L3, HVR-H1, HVR-H2, and HVR-H3 of an antibody selected from the group consisting of: 1A7, 3A2, 3B10, 6G12, 6H6, 7A9, 7B3, 8A1, 8E10, 8F11, 8F8, 9F5, 9G1, 9G3, 10A9, 10C1, 11A8, 12E2, 12F9, 12G6, 2C7, 2F5, 3C1, 4D7, 4D11, 6C11, 6G12, 7A3, 7C5, 7E9, 7F6, 7G1, 7H1, 8C3, 8F10, 12A1, 1E9, 2C5, 3C5, 4C12, 4F2, 5A2, 6B3, 7D1, 7D9, 11D8, 8A12, 10E7, 10B11, 10D2, 7D5, 2A7, 3G12, 6H9, 8G9, 9B4, 10A1, 11A8, 12F3, 2F8, 10E3, 1H7, 2F6, 2H8, 3A7, 7E5, 7F8, 11H5, 7C5, 4F11, 12D9, 1B4v1, 1B4v2, 6H2, 7B11v1, 7B11v2, 18D8, 18E4v1, 18E4v2, 29F6v1, 29F6v2, 40D5v1, 40D5v2, 43B9, 44A8v1, 44A8v2, 44B4v1, and 44B4v2. In some embodiments: (a) the HVR-L1 comprises an amino acid sequence selected from the group consisting of SEQ ID NOs: 9-23, 581, 690-694, 734-738, and 826-828; (b) the HVR-L2 comprises an amino acid sequence selected from the group consisting of SEQ ID NOs: 24-33, 695-697, and 739-743; (c) the HVR-L3 comprises an amino acid sequence selected from the group consisting of SEQ ID NOs: 34-47, 582, 583, 698-702, and 744-746; (d) the HVR-H1 comprises an amino acid sequence selected from the group consisting of SEQ ID NOs: 48-65, 584, 703-705, 747-754, and 829-835; (e) the HVR-H2 comprises an amino acid sequence selected from the group consisting of SEQ ID NOs: 66-84, 585-587, 706-708, 755-762, 836-842, and 888; or (f) the HVR-H3 comprises an amino acid sequence selected from the group consisting of SEQ ID NOs: 85-102, 588, 589, 709, 710, and 763-770. In some embodiments: (a) the HVR-L1 comprises the amino acid sequence of SEQ ID NO: 9, the HVR-L2 comprises the amino acid sequence of SEQ ID NO: 24, the HVR-L3 comprises the amino acid sequence of SEQ ID NO: 34, the HVR-H1 comprises the amino acid sequence of SEQ ID NO: 48, the HVR-H2 comprises the amino acid sequence of SEQ ID NO: 66, and the HVR-H3 comprises the amino acid sequence of SEQ ID NO: 85; (b) the HVR-L1 comprises the amino acid sequence of SEQ ID NO: 9, the HVR-L2 comprises the amino acid sequence of SEQ ID NO: 24, the HVR-L3 comprises the amino acid sequence of SEQ ID NO: 34, the HVR-H1 comprises the amino acid sequence of SEQ ID NO: 48, the HVR-H2 comprises the amino acid sequence of SEQ ID NO: 66, and the HVR-H3 comprises the amino acid sequence of SEQ ID NO: 85; (c) the HVR-L1 comprises the amino acid sequence of SEQ ID NO: 10, the HVR-L2 comprises the amino acid sequence of SEQ ID NO: 25, the HVR-L3 comprises the amino acid sequence of SEQ ID NO: 35, the HVR-H1 comprises the amino acid sequence of SEQ ID NO: 49, the HVR-H2 comprises the amino acid sequence of SEQ ID NO: 67, and the HVR-H3 comprises the amino acid sequence of SEQ ID NO: 86; (d) the HVR-L1 comprises the amino acid sequence of SEQ ID NO: 12, the HVR-L2 comprises the amino acid sequence of SEQ ID NO: 26, the HVR-L3 comprises the amino acid sequence of SEQ ID NO: 37, the HVR-H1 comprises the amino acid sequence of SEQ ID NO: 50, the HVR-H2 comprises the amino acid sequence of SEQ ID NO: 68, and the HVR-H3 comprises the amino acid sequence of SEQ ID NO: 87; (e) the HVR-L1 comprises the amino acid sequence of SEQ ID NO: 11, the HVR-L2 comprises the amino acid sequence of SEQ ID NO: 26, the HVR-L3 comprises the amino acid sequence of SEQ ID NO: 36, the HVR-H1 comprises the amino acid sequence of SEQ ID NO: 51, the HVR-H2 comprises the amino acid sequence of SEQ ID NO: 69, and the HVR-H3 comprises the amino acid sequence of SEQ ID NO: 88; (f) the HVR-L1 comprises the amino acid sequence of SEQ ID NO: 13, the HVR-L2 comprises the amino acid sequence of SEQ ID NO: 27, the HVR-L3 comprises the amino acid sequence of SEQ ID NO: 38, the HVR-H1 comprises the amino acid sequence of SEQ ID NO: 52, the HVR-H2 comprises the amino acid sequence of SEQ ID NO: 70, and the HVR-H3 comprises the amino acid sequence of SEQ ID NO: 89; (g) the HVR-L1 comprises the amino acid sequence of SEQ ID NO: 14, the HVR-L2 comprises the amino acid sequence of SEQ ID NO: 28, the HVR-L3 comprises the amino acid sequence of SEQ ID NO: 39, the HVR-H1 comprises the amino acid sequence of SEQ ID NO: 53, the HVR-H2 comprises the amino acid sequence of SEQ ID NO: 71, and the HVR-H3 comprises the amino acid sequence of SEQ ID NO: 90; (h) the HVR-L1 comprises the amino acid sequence of SEQ ID NO: 13, the HVR-L2 comprises the amino acid sequence of SEQ ID NO: 27, the HVR-L3 comprises the amino acid sequence of SEQ ID NO: 38, the HVR-H1 comprises the amino acid sequence of SEQ ID NO: 52, the HVR-H2 comprises the amino acid sequence of SEQ ID NO: 70, and the HVR-H3 comprises the amino acid sequence of SEQ ID NO: 89; (i) the HVR-L1 comprises the amino acid sequence of SEQ ID NO: 13, the HVR-L2 comprises the amino acid sequence of SEQ ID NO: 27, the HVR-L3 comprises the amino acid sequence of SEQ ID NO: 38, the HVR-H1 comprises the amino acid sequence of SEQ ID NO: 52, the HVR-H2 comprises the amino acid sequence of SEQ ID NO: 70, and the HVR-H3 comprises the amino acid sequence of SEQ ID NO: 89; (j) the HVR-L1 comprises the amino acid sequence of SEQ ID NO: 15, the HVR-L2 comprises the amino acid sequence of SEQ ID NO: 28, the HVR-L3 comprises the amino acid sequence of SEQ ID NO: 40, the HVR-H1 comprises the amino acid sequence of SEQ ID NO: 54, the HVR-H2 comprises the amino acid sequence of SEQ ID NO: 72, and the HVR-H3 comprises the amino acid sequence of SEQ ID NO: 91; (k) the HVR-L1 comprises the amino acid sequence of SEQ ID NO: 11, the HVR-L2 comprises the amino acid sequence of SEQ ID NO: 26, the HVR-L3 comprises the amino acid sequence of SEQ ID NO: 36, the HVR-H1 comprises the amino acid sequence of SEQ ID NO: 51, the HVR-H2 comprises the amino acid sequence of SEQ ID NO: 69, and the HVR-H3 comprises the amino acid sequence of SEQ ID NO: 88; (1) the HVR-L1 comprises the amino acid sequence of SEQ ID NO: 16, the HVR-L2 comprises the amino acid sequence of SEQ ID NO: 29, the HVR-L3 comprises the amino acid sequence of SEQ ID NO: 35, the HVR-H1 comprises the amino acid sequence of SEQ ID NO: 55, the HVR-H2 comprises the amino acid sequence of SEQ ID NO: 73, and the HVR-H3 comprises the amino acid sequence of SEQ ID NO: 92; (m) the HVR-L1 comprises the amino acid sequence of SEQ ID NO: 15, the HVR-L2 comprises the amino acid sequence of SEQ ID NO: 28, the HVR-L3 comprises the amino acid sequence of SEQ ID NO: 40, the HVR-H1 comprises the amino acid sequence of SEQ ID NO: 54, the HVR-H2 comprises the amino acid sequence of SEQ ID NO: 72, and the HVR-H3 comprises the amino acid sequence of SEQ ID NO: 91; (n) the HVR-L1 comprises the amino acid sequence of SEQ ID NO: 581, the HVR-L2 comprises the amino acid sequence of SEQ ID NO: 29, the HVR-L3 comprises the amino acid sequence of SEQ ID NO: 582, the HVR-H1 comprises the amino acid sequence of SEQ ID NO: 56, the HVR-H2 comprises the amino acid sequence of SEQ ID NO: 74, and the HVR-H3 comprises the amino acid sequence of SEQ ID NO: 93; (o) the HVR-L1 comprises the amino acid sequence of SEQ ID NO: 17, the HVR-L2 comprises the amino acid sequence of SEQ ID NO: 30, the HVR-L3 comprises the amino acid sequence of SEQ ID NO: 41, the HVR-H1 comprises the amino acid sequence of SEQ ID NO: 57, the HVR-H2 comprises the amino acid sequence of SEQ ID NO: 75, and the HVR-H3 comprises the amino acid sequence of SEQ ID NO: 94; (p) the HVR-H1 comprises the amino acid sequence of SEQ ID NO: 58, the HVR-H2 comprises the amino acid sequence of SEQ ID NO: 76, and the HVR-H3 comprises the amino acid sequence of SEQ ID NO: 95; (q) the HVR-L1 comprises the amino acid sequence of SEQ ID NO: 18, the HVR-L2 comprises the amino acid sequence of SEQ ID NO: 31, the HVR-L3 comprises the amino acid sequence of SEQ ID NO: 42, the HVR-H1 comprises the amino acid sequence of SEQ ID NO: 59, the HVR-H2 comprises the amino acid sequence of SEQ ID NO: 77, and the HVR-H3 comprises the amino acid sequence of SEQ ID NO: 96; (r) the HVR-L1 comprises the amino acid sequence of SEQ ID NO: 19, the HVR-L2 comprises the amino acid sequence of SEQ ID NO: 28, the HVR-L3 comprises the amino acid sequence of SEQ ID NO: 43, the HVR-H1 comprises the amino acid sequence of SEQ ID NO: 60, the HVR-H2 comprises the amino acid sequence of SEQ ID NO: 78, and the HVR-H3 comprises the amino acid sequence of SEQ ID NO: 97; (s) the HVR-L1 comprises the amino acid sequence of SEQ ID NO: 20, the HVR-L2 comprises the amino acid sequence of SEQ ID NO: 28, the HVR-L3 comprises the amino acid sequence of SEQ ID NO: 44, the HVR-H1 comprises the amino acid sequence of SEQ ID NO: 61, the HVR-H2 comprises the amino acid sequence of SEQ ID NO: 79, and the HVR-H3 comprises the amino acid sequence of SEQ ID NO: 98; (t) the HVR-L1 comprises the amino acid sequence of SEQ ID NO: 21, the HVR-L2 comprises the amino acid sequence of SEQ ID NO: 32, the HVR-L3 comprises the amino acid sequence of SEQ ID NO: 45, the HVR-H1 comprises the amino acid sequence of SEQ ID NO: 62, the HVR-H2 comprises the amino acid sequence of SEQ ID NO: 80, and the HVR-H3 comprises the amino acid sequence of SEQ ID NO: 99; (u) the HVR-L1 comprises the amino acid sequence of SEQ ID NO: 15, the HVR-L2 comprises the amino acid sequence of SEQ ID NO: 33, the HVR-L3 comprises the amino acid sequence of SEQ ID NO: 40, the HVR-H1 comprises the amino acid sequence of SEQ ID NO: 54, the HVR-H2 comprises the amino acid sequence of SEQ ID NO: 81, and the HVR-H3 comprises the amino acid sequence of SEQ ID NO: 91; (v) the HVR-L1 comprises the amino acid sequence of SEQ ID NO: 22, the HVR-L2 comprises the amino acid sequence of SEQ ID NO: 29, the HVR-L3 comprises the amino acid sequence of SEQ ID NO: 46, the HVR-H1 comprises the amino acid sequence of SEQ ID NO: 63, the HVR-H2 comprises the amino acid sequence of SEQ ID NO: 82, and the HVR-H3 comprises the amino acid sequence of SEQ ID NO: 100; (w) the HVR-L1 comprises the amino acid sequence of SEQ ID NO: 23, the HVR-L2 comprises the amino acid sequence of SEQ ID NO: 29, the HVR-L3 comprises the amino acid sequence of SEQ ID NO: 47, the HVR-H1 comprises the amino acid sequence of SEQ ID NO: 64, the HVR-H2 comprises the amino acid sequence of SEQ ID NO: 83, and the HVR-H3 comprises the amino acid sequence of SEQ ID NO: 101; (x) the HVR-L1 comprises the amino acid sequence of SEQ ID NO: 16, the HVR-L2 comprises the amino acid sequence of SEQ ID NO: 29, the HVR-L3 comprises the amino acid sequence of SEQ ID NO: 35, the HVR-H1 comprises the amino acid sequence of SEQ ID NO: 65, the HVR-H2 comprises the amino acid sequence of SEQ ID NO: 84, and the HVR-H3 comprises the amino acid sequence of SEQ ID NO: 102; (y) the HVR-L1 comprises the amino acid sequence of SEQ ID NO: 581, the HVR-L2 comprises the amino acid sequence of SEQ ID NO: 29, the HVR-L3 comprises the amino acid sequence of SEQ ID NO: 582, the HVR-H1 comprises the amino acid sequence of SEQ ID NO: 56, the HVR-H2 comprises the amino acid sequence of SEQ ID NO: 585, and the HVR-H3 comprises the amino acid sequence of SEQ ID NO: 588; (z) the HVR-L1 comprises the amino acid sequence of SEQ ID NO: 10, the HVR-L2 comprises the amino acid sequence of SEQ ID NO: 29, the HVR-L3 comprises the amino acid sequence of SEQ ID NO: 35, the HVR-H1 comprises the amino acid sequence of SEQ ID NO: 49, the HVR-H2 comprises the amino acid sequence of SEQ ID NO: 586, and the HVR-H3 comprises the amino acid sequence of SEQ ID NO: 86; or (aa) the HVR-L1 comprises the amino acid sequence of SEQ ID NO: 14, the HVR-L2 comprises the amino acid sequence of SEQ ID NO: 28, the HVR-L3 comprises the amino acid sequence of SEQ ID NO: 583, the HVR-H1 comprises the amino acid sequence of SEQ ID NO: 584, the HVR-H2 comprises the amino acid sequence of SEQ ID NO: 587, and the HVR-H3 comprises the amino acid sequence of SEQ ID NO: 589. In some embodiments, the light chain variable domain comprises: (a) an HVR-L1 comprising an amino acid sequence selected from the group consisting of SEQ ID NOs: 9-23, 581, 690-694, 734-738, and 826-828, or an amino acid sequence with at least about 90% homology to an amino acid sequence selected from the group consisting of SEQ ID NOs: 9-23, 581, 690-694, 734-738, and 826-828; (b) an HVR-L2 comprising an amino acid sequence selected from the group consisting of SEQ ID NOs: 24-33, 695-697, and 739-743, or an amino acid sequence with at least about 90% homology to an amino acid sequence selected from the group consisting of SEQ ID NOs: 24-33, 695-697, and 739-743; and (c) an HVR-L3 comprising an amino acid sequence selected from the group consisting of SEQ ID NOs: 34-47, 582, 583, 698-702, and 744-746, or an amino acid sequence with at least about 90% homology to an amino acid sequence selected from the group consisting of SEQ ID NOs: 34-47, 582, 583, 698-702, and 744-746; and wherein the heavy chain variable domain comprises: (a) an HVR-H1 comprising an amino acid sequence selected from the group consisting of SEQ ID NOs: 48-65, 584, 703-705, 747-754, and 829-835, or an amino acid sequence with at least about 90% homology to an amino acid sequence selected from the group consisting of SEQ ID NOs: 48-65, 584, 703-705, 747-754, and 829-835; (b) an HVR-H2 comprising an amino acid sequence selected from the group consisting of SEQ ID NOs: 66-84, 585-587, 706-708, 755-762, 836-842, and 888, or an amino acid sequence with at least about 90% homology to an amino acid sequence selected from the group consisting of SEQ ID NOs: 66-84, 585-587, 706-708, 755-762, 836-842, and 888; and (c) an HVR-H3 comprising an amino acid sequence selected from the group consisting of SEQ ID NOs: 85-102, 588, 589, 709, 710, and 763-770, or an amino acid sequence with at least about 90% homology to an amino acid sequence selected from the group consisting of SEQ ID NOs: 85-102, 588, 589, 709, 710, and 763-770. In some embodiments, the anti-TREM2 antibody comprises a light chain variable domain and a heavy chain variable domain, wherein the light chain variable domain comprises HVR-L1, HVR-L2, HVR-L3, the heavy chain variable domain comprises HVR-H1, HVR-H2, and HVR-H3, and wherein the HVR-H3 comprises an amino acid sequence selected from the group consisting of SEQ ID NOs: 85-102, 588, 589, 709, 710, and 763-770, or an amino acid sequence with at least about 90% homology to an amino acid sequence selected from the group consisting of SEQ ID NOs: 85-102, 588, 589, 709, 710, and 763-770. In some embodiments, the antibody comprises a light chain variable domain comprising an amino acid sequence selected from the group consisting of SEQ ID NOs: 219-398, 602-634, 679-689, 724-730, 809-816, 821, 843, 844, 849, and 850; and/or a heavy chain variable domain comprising an amino acid sequence selected from the group consisting of SEQ ID NOs: 399-580, 635-678, 731-733, 817-820, 822-825, and 845-847. hi some embodiments, the antibody comprises a light chain variable domain and a heavy chain variable domain, wherein: (a) the light chain variable domain comprises the amino acid sequence of SEQ ID NO: 333 and the heavy chain variable domain comprises the amino acid sequence of SEQ ID NO:521; (b) the light chain variable domain comprises the amino acid sequence of SEQ ID NO: 850 and the heavy chain variable domain comprises the amino acid sequence of SEQ ID NO:521; (c) the light chain variable domain comprises the amino acid sequence of SEQ ID NO: 334 and the heavy chain variable domain comprises the amino acid sequence of SEQ ID NO:522; (d) the light chain variable domain comprises the amino acid sequence of SEQ ID NO: 335 and the heavy chain variable domain comprises the amino acid sequence of SEQ ID NO:523; (e) the light chain variable domain comprises the amino acid sequence of SEQ ID NO: 336 and the heavy chain variable domain comprises the amino acid sequence of SEQ ID NO:524; (f) the light chain variable domain comprises the amino acid sequence of SEQ ID NO: 337 and the heavy chain variable domain comprises the amino acid sequence of SEQ ID NO:525; (g) the light chain variable domain comprises the amino acid sequence of SEQ ID NO: 338 and the heavy chain variable domain comprises the amino acid sequence of SEQ ID NO:526; (h) the light chain variable domain comprises the amino acid sequence of SEQ ID NO: 339 and the heavy chain variable domain comprises the amino acid sequence of SEQ ID NO:526; (i) the light chain variable domain comprises the amino acid sequence of SEQ ID NO: 340 and the heavy chain variable domain comprises the amino acid sequence of SEQ ID NO:527; (j) the light chain variable domain comprises the amino acid sequence of SEQ ID NO: 341 and the heavy chain variable domain comprises the amino acid sequence of SEQ ID NO:528; (k) the light chain variable domain comprises the amino acid sequence of SEQ ID NO: 342 and the heavy chain variable domain comprises the amino acid sequence of SEQ ID NO:529; (1) the light chain variable domain comprises the amino acid sequence of SEQ ID NO: 343 and the heavy chain variable domain comprises the amino acid sequence of SEQ ID NO:530; (m) the light chain variable domain comprises the amino acid sequence of SEQ ID NO: 843 and the heavy chain variable domain comprises the amino acid sequence of SEQ ID NO:845; (n) the light chain variable domain comprises the amino acid sequence of SEQ ID NO: 844 and the heavy chain variable domain comprises the amino acid sequence of SEQ ID NO:846; (o) the light chain variable domain comprises the amino acid sequence of SEQ ID NO:844 and the heavy chain variable domain comprises the amino acid sequence of SEQ ID NO:847; (p) the light chain variable domain comprises the amino acid sequence of SEQ ID NO: 219 and the heavy chain variable domain comprises the amino acid sequence of SEQ ID NO:399; (q) the light chain variable domain comprises the amino acid sequence of SEQ ID NO: 230 and the heavy chain variable domain comprises the amino acid sequence of SEQ ID NO:409; (r) the light chain variable domain comprises the amino acid sequence of SEQ ID NO: 252 and the heavy chain variable domain comprises the amino acid sequence of SEQ ID NO:419; (s) the light chain variable domain comprises the amino acid sequence of SEQ ID NO: 241 and the heavy chain variable domain comprises the amino acid sequence of SEQ ID NO:429; (t) the light chain variable domain comprises the amino acid sequence of SEQ ID NO: 849 and the heavy chain variable domain comprises the amino acid sequence of SEQ ID NO:429; (u) the light chain variable domain comprises the amino acid sequence of SEQ ID NO: 263 and the heavy chain variable domain comprises the amino acid sequence of SEQ ID NO:439; (v) the light chain variable domain comprises the amino acid sequence of SEQ ID NO: 274 and the heavy chain variable domain comprises the amino acid sequence of SEQ ID NO:449; (w) the light chain variable domain comprises the amino acid sequence of SEQ ID NO:285 and the heavy chain variable domain comprises the amino acid sequence of SEQ ID NO:459; (x) the light chain variable domain comprises the amino acid sequence of SEQ ID NO:286 and the heavy chain variable domain comprises the amino acid sequence of SEQ ID NO:460; (y) the light chain variable domain comprises the amino acid sequence of SEQ ID NO: 287 and the heavy chain variable domain comprises the amino acid sequence of SEQ ID NO:461; (z) the light chain variable domain comprises the amino acid sequence of SEQ ID NO: 298 and the heavy chain variable domain comprises the amino acid sequence of SEQ ID NO:429; (aa) the light chain variable domain comprises the amino acid sequence of SEQ ID NO:299 and the heavy chain variable domain comprises the amino acid sequence of SEQ ID NO:471; (bb) the light chain variable domain comprises the amino acid sequence of SEQ ID NO: 310 and the heavy chain variable domain comprises the amino acid sequence of SEQ ID NO:461; (cc) the light chain variable domain comprises the amino acid sequence of SEQ ID NO: 679 and the heavy chain variable domain comprises the amino acid sequence of SEQ ID NO:481; (dd) the light chain variable domain comprises the amino acid sequence of SEQ ID NO: 311 and the heavy chain variable domain comprises the amino acid sequence of SEQ ID NO:491; (ee) the light chain variable domain comprises the amino acid sequence of SEQ ID NO: 322 and the heavy chain variable domain comprises the amino acid sequence of SEQ ID NO:511; (ff) the light chain variable domain comprises the amino acid sequence of SEQ ID NO: 344 and the heavy chain variable domain comprises the amino acid sequence of SEQ ID NO:531; (gg) the light chain variable domain comprises the amino acid sequence of SEQ ID NO: 355 and the heavy chain variable domain comprises the amino acid sequence of SEQ ID NO:635; (hh) the light chain variable domain comprises the amino acid sequence of SEQ ID NO: 365 and the heavy chain variable domain comprises the amino acid sequence of SEQ ID NO:541; (ii) the light chain variable domain comprises the amino acid sequence of SEQ ID NO: 376 and the heavy chain variable domain comprises the amino acid sequence of SEQ ID NO:551; (jj) the light chain variable domain comprises the amino acid sequence of SEQ ID NO: 387 and the heavy chain variable domain comprises the amino acid sequence of SEQ ID NO:561; (kk) the light chain variable domain comprises the amino acid sequence of SEQ ID NO: 398 and the heavy chain variable domain comprises the amino acid sequence of SEQ ID NO:571; (11) the light chain variable domain comprises the amino acid sequence of SEQ ID NO: 724 and the heavy chain variable domain comprises the amino acid sequence of SEQ ID NO:731; (mm) the light chain variable domain comprises the amino acid sequence of SEQ ID NO: 809 and the heavy chain variable domain comprises the amino acid sequence of SEQ ID NO:731; (nn) the light chain variable domain comprises the amino acid sequence of SEQ ID NO: 725 and the heavy chain variable domain comprises the amino acid sequence of SEQ ID NO:732; (oo) the light chain variable domain comprises the amino acid sequence of SEQ ID NO: 726 and the heavy chain variable domain comprises the amino acid sequence of SEQ ID NO:731; (pp) the light chain variable domain comprises the amino acid sequence of SEQ ID NO: 726 and the heavy chain variable domain comprises the amino acid sequence of SEQ ID NO:817; (qq) the light chain variable domain comprises the amino acid sequence of SEQ ID NO: 727 and the heavy chain variable domain comprises the amino acid sequence of SEQ ID NO:731; (rr) the light chain variable domain comprises the amino acid sequence of SEQ ID NO: 728 and the heavy chain variable domain comprises the amino acid sequence of SEQ ID NO:733; (ss) the light chain variable domain comprises the amino acid sequence of SEQ ID NO:810 and the heavy chain variable domain comprises the amino acid sequence of SEQ ID NO:818; (tt) the light chain variable domain comprises the amino acid sequence of SEQ ID NO:811 and the heavy chain variable domain comprises the amino acid sequence of SEQ ID NO:733; (uu) the light chain variable domain comprises the amino acid sequence of SEQ ID NO:729 and the heavy chain variable domain comprises the amino acid sequence of SEQ ID NO:731; (vv) the light chain variable domain comprises the amino acid sequence of SEQ ID NO:812 and the heavy chain variable domain comprises the amino acid sequence of SEQ ID NO:819; (ww) the light chain variable domain comprises the amino acid sequence of SEQ ID NO:729 and the heavy chain variable domain comprises the amino acid sequence of SEQ ID NO:820; (xx) the light chain variable domain comprises the amino acid sequence of SEQ ID NO: 730 and the heavy chain variable domain comprises the amino acid sequence of SEQ ID NO:731; (yy) the light chain variable domain comprises the amino acid sequence of SEQ ID NO:813 and the heavy chain variable domain comprises the amino acid sequence of SEQ ID NO:731; (zz) the light chain variable domain comprises the amino acid sequence of SEQ ID NO:814 and the heavy chain variable domain comprises the amino acid sequence of SEQ ID NO:822; (aaa) the light chain variable domain comprises the amino acid sequence of SEQ ID NO:815 and the heavy chain variable domain comprises the amino acid sequence of SEQ ID NO:824; or (bbb) the light chain variable domain comprises the amino acid sequence of SEQ ID NO:816 and the heavy chain variable domain comprises the amino acid sequence of SEQ ID NO:825.

[0037] Other aspects of the present disclosure relate to an isolated (e.g., monoclonal) antibody that binds to a TREM2 protein, wherein the antibody comprises a light chain variable domain comprising an amino acid sequence selected from the group consisting of SEQ ID NOs: 219-398, 602-634, 679-689, 724-730, 809-816, 821, 843, 844, 849, and 850; and/or a heavy chain variable domain comprising an amino acid sequence selected from the group consisting of SEQ ID NOs: 399-580, 635-678, 731-733, and 817-820, 822-825, and 845-847. In some embodiments, the antibody comprises a light chain variable domain comprising the amino acid sequence of SEQ ID NO:843 and a heavy chain variable domain comprising the amino acid sequence of SEQ ID NO:845. In some embodiments, the antibody comprises a light chain variable domain comprising the amino acid sequence of SEQ ID NO:843 and a heavy chain variable domain comprising the amino acid sequence of SEQ ID NO:846. In some embodiments, the antibody comprises a light chain variable domain comprising the amino acid sequence of SEQ ID NO:843 and a heavy chain variable domain comprising the amino acid sequence of SEQ ID NO:847. In some embodiments, the antibody comprises a light chain variable domain comprising the amino acid sequence of SEQ ID NO:844 and a heavy chain variable domain comprising the amino acid sequence of SEQ ID NO:847. In some embodiments, the antibody comprises a light chain variable domain and a heavy chain variable domain, wherein: (a) the light chain variable domain comprises the amino acid sequence of SEQ ID NO: 333 and the heavy chain variable domain comprises the amino acid sequence of SEQ ID NO:521; (b) the light chain variable domain comprises the amino acid sequence of SEQ ID NO: 850 and the heavy chain variable domain comprises the amino acid sequence of SEQ ID NO:521; (c) the light chain variable domain comprises the amino acid sequence of SEQ ID NO: 334 and the heavy chain variable domain comprises the amino acid sequence of SEQ ID NO:522; (d) the light chain variable domain comprises the amino acid sequence of SEQ ID NO: 335 and the heavy chain variable domain comprises the amino acid sequence of SEQ ID NO:523; (e) the light chain variable domain comprises the amino acid sequence of SEQ ID NO: 336 and the heavy chain variable domain comprises the amino acid sequence of SEQ ID NO:524; (f) the light chain variable domain comprises the amino acid sequence of SEQ ID NO: 337 and the heavy chain variable domain comprises the amino acid sequence of SEQ ID NO:525; (g) the light chain variable domain comprises the amino acid sequence of SEQ ID NO: 338 and the heavy chain variable domain comprises the amino acid sequence of SEQ ID NO:526; (h) the light chain variable domain comprises the amino acid sequence of SEQ ID NO: 339 and the heavy chain variable domain comprises the amino acid sequence of SEQ ID NO:526; (i) the light chain variable domain comprises the amino acid sequence of SEQ ID NO: 340 and the heavy chain variable domain comprises the amino acid sequence of SEQ ID NO:527; (j) the light chain variable domain comprises the amino acid sequence of SEQ ID NO: 341 and the heavy chain variable domain comprises the amino acid sequence of SEQ ID NO:528; (k) the light chain variable domain comprises the amino acid sequence of SEQ ID NO: 342 and the heavy chain variable domain comprises the amino acid sequence of SEQ ID NO:529; (1) the light chain variable domain comprises the amino acid sequence of SEQ ID NO: 343 and the heavy chain variable domain comprises the amino acid sequence of SEQ ID NO:530; (m) the light chain variable domain comprises the amino acid sequence of SEQ ID NO: 843 and the heavy chain variable domain comprises the amino acid sequence of SEQ ID NO:845; (n) the light chain variable domain comprises the amino acid sequence of SEQ ID NO: 844 and the heavy chain variable domain comprises the amino acid sequence of SEQ ID NO:846; (o) the light chain variable domain comprises the amino acid sequence of SEQ ID NO:844 and the heavy chain variable domain comprises the amino acid sequence of SEQ ID NO:847; (p) the light chain variable domain comprises the amino acid sequence of SEQ ID NO: 219 and the heavy chain variable domain comprises the amino acid sequence of SEQ ID NO:399; (q) the light chain variable domain comprises the amino acid sequence of SEQ ID NO: 230 and the heavy chain variable domain comprises the amino acid sequence of SEQ ID NO:409; (r) the light chain variable domain comprises the amino acid sequence of SEQ ID NO: 252 and the heavy chain variable domain comprises the amino acid sequence of SEQ ID NO:419; (s) the light chain variable domain comprises the amino acid sequence of SEQ ID NO: 241 and the heavy chain variable domain comprises the amino acid sequence of SEQ ID NO:429; (t) the light chain variable domain comprises the amino acid sequence of SEQ ID NO: 849 and the heavy chain variable domain comprises the amino acid sequence of SEQ ID NO:429; (u) the light chain variable domain comprises the amino acid sequence of SEQ ID NO: 263 and the heavy chain variable domain comprises the amino acid sequence of SEQ ID NO:439; (v) the light chain variable domain comprises the amino acid sequence of SEQ ID NO: 274 and the heavy chain variable domain comprises the amino acid sequence of SEQ ID NO:449; (w) the light chain variable domain comprises the amino acid sequence of SEQ ID NO:285 and the heavy chain variable domain comprises the amino acid sequence of SEQ ID NO:459; (x) the light chain variable domain comprises the amino acid sequence of SEQ ID NO:286 and the heavy chain variable domain comprises the amino acid sequence of SEQ ID NO:460; (y) the light chain variable domain comprises the amino acid sequence of SEQ ID NO: 287 and the heavy chain variable domain comprises the amino acid sequence of SEQ ID NO:461; (z) the light chain variable domain comprises the amino acid sequence of SEQ ID NO: 298 and the heavy chain variable domain comprises the amino acid sequence of SEQ ID NO:429; (aa) the light chain variable domain comprises the amino acid sequence of SEQ ID NO:299 and the heavy chain variable domain comprises the amino acid sequence of SEQ ID NO:471; (bb) the light chain variable domain comprises the amino acid sequence of SEQ ID NO: 310 and the heavy chain variable domain comprises the amino acid sequence of SEQ ID NO:461; (cc) the light chain variable domain comprises the amino acid sequence of SEQ ID NO: 679 and the heavy chain variable domain comprises the amino acid sequence of SEQ ID NO:481; (dd) the light chain variable domain comprises the amino acid sequence of SEQ ID NO: 311 and the heavy chain variable domain comprises the amino acid sequence of SEQ ID NO:491; (ee) the light chain variable domain comprises the amino acid sequence of SEQ ID NO: 322 and the heavy chain variable domain comprises the amino acid sequence of SEQ ID NO:511; (ff) the light chain variable domain comprises the amino acid sequence of SEQ ID NO: 344 and the heavy chain variable domain comprises the amino acid sequence of SEQ ID NO:531; (gg) the light chain variable domain comprises the amino acid sequence of SEQ ID NO: 355 and the heavy chain variable domain comprises the amino acid sequence of SEQ ID NO:635; (hh) the light chain variable domain comprises the amino acid sequence of SEQ ID NO: 365 and the heavy chain variable domain comprises the amino acid sequence of SEQ ID NO:541; (ii) the light chain variable domain comprises the amino acid sequence of SEQ ID NO: 376 and the heavy chain variable domain comprises the amino acid sequence of SEQ ID NO:551; (jj) the light chain variable domain comprises the amino acid sequence of SEQ ID NO: 387 and the heavy chain variable domain comprises the amino acid sequence of SEQ ID NO:561; (kk) the light chain variable domain comprises the amino acid sequence of SEQ ID NO: 398 and the heavy chain variable domain comprises the amino acid sequence of SEQ ID NO:571; (11) the light chain variable domain comprises the amino acid sequence of SEQ ID NO: 724 and the heavy chain variable domain comprises the amino acid sequence of SEQ ID NO:731; (mm) the light chain variable domain comprises the amino acid sequence of SEQ ID NO: 809 and the heavy chain variable domain comprises the amino acid sequence of SEQ ID NO:731; (nn) the light chain variable domain comprises the amino acid sequence of SEQ ID NO: 725 and the heavy chain variable domain comprises the amino acid sequence of SEQ ID NO:732; (oo) the light chain variable domain comprises the amino acid sequence of SEQ ID NO: 726 and the heavy chain variable domain comprises the amino acid sequence of SEQ ID NO:731; (pp) the light chain variable domain comprises the amino acid sequence of SEQ ID NO: 726 and the heavy chain variable domain comprises the amino acid sequence of SEQ ID NO:817; (qq) the light chain variable domain comprises the amino acid sequence of SEQ ID NO: 727 and the heavy chain variable domain comprises the amino acid sequence of SEQ ID NO:731; (rr) the light chain variable domain comprises the amino acid sequence of SEQ ID NO: 728 and the heavy chain variable domain comprises the amino acid sequence of SEQ ID NO:733; (ss) the light chain variable domain comprises the amino acid sequence of SEQ ID NO:810 and the heavy chain variable domain comprises the amino acid sequence of SEQ ID NO:818; (tt) the light chain variable domain comprises the amino acid sequence of SEQ ID NO:811 and the heavy chain variable domain comprises the amino acid sequence of SEQ ID NO:733; (uu) the light chain variable domain comprises the amino acid sequence of SEQ ID NO:729 and the heavy chain variable domain comprises the amino acid sequence of SEQ ID NO:731; (vv) the light chain variable domain comprises the amino acid sequence of SEQ ID NO:812 and the heavy chain variable domain comprises the amino acid sequence of SEQ ID NO:819; (ww) the light chain variable domain comprises the amino acid sequence of SEQ ID NO:729 and the heavy chain variable domain comprises the amino acid sequence of SEQ ID NO:820; (xx) the light chain variable domain comprises the amino acid sequence of SEQ ID NO: 730 and the heavy chain variable domain comprises the amino acid sequence of SEQ ID NO:731; (yy) the light chain variable domain comprises the amino acid sequence of SEQ ID NO:813 and the heavy chain variable domain comprises the amino acid sequence of SEQ ID NO:731; (zz) the light chain variable domain comprises the amino acid sequence of SEQ ID NO:814 and the heavy chain variable domain comprises the amino acid sequence of SEQ ID NO:822; (aaa) the light chain variable domain comprises the amino acid sequence of SEQ ID NO:815 and the heavy chain variable domain comprises the amino acid sequence of SEQ ID NO:824; or (bbb) the light chain variable domain comprises the amino acid sequence of SEQ ID NO:816 and the heavy chain variable domain comprises the amino acid sequence of SEQ ID NO:825.

[0038] Other aspects of the present disclosure relate to an isolated (e.g., monoclonal) antibody that binds to a TREM2 protein, wherein the antibody comprises a light chain variable domain of an antibody selected from the group consisting of: 1A7, 3A2, 3B10, 6G12, 6H6, 7A9, 7B3, 8A1, 8E10, 8F11, 8F8, 9F5, 9G1, 9G3, 10A9, 10C1, 11A8, 12E2, 12F9, 12G6, 2C7, 2F5, 3C1, 4D7, 4D11, 6C11, 6G12, 7A3, 7C5, 7E9, 7F6, 7G1, 7H1, 8C3, 8F10, 12A1, 1E9, 2C5, 3C5, 4C12, 4F2, 5A2, 6B3, 7D1, 7D9, 11D8, 8A12, 10E7, 10B11, 10D2, 7D5, 2A7, 3G12, 6H9, 8G9, 9B4, 10A1, 11A8, 12F3, 2F8, 10E3, 1H7, 2F6, 2H8, 3A7, 7E5, 7F8, 11H5, 7C5, 4F11, 12D9, 1B4v1, 1B4v2, 6H2, 7B11v1, 7B11v2, 18D8, 18E4v1, 18E4v2, 29F6v1, 29F6v2, 40D5v1, 40D5v2, 43B9, 44A8v1, 44A8v2, 44B4v1, and 44B4v2; and/or a heavy chain variable domain of an antibody selected from the group consisting of: 1A7, 3A2, 3B10, 6G12, 6H6, 7A9, 7B3, 8A1, 8E10, 8F11, 8F8, 9F5, 9G1, 9G3, 10A9, 10C1, 11A8, 12E2, 12F9, 12G6, 2C7, 2F5, 3C1, 4D7, 4D11, 6C11, 6G12, 7A3, 7C5, 7E9, 7F6, 7G1, 7H1, 8C3, 8F10, 12A1, 1E9, 2C5, 3C5, 4C12, 4F2, 5A2, 6B3, 7D1, 7D9, 11D8, 8A12, 10E7, 10B11, 10D2, 7D5, 2A7, 3G12, 6H9, 8G9, 9B4, 10A1, 11A8, 12F3, 2F8, 10E3, 1H7, 2F6, 2H8, 3A7, 7E5, 7F8, 11H5, 7C5, 4F11, 12D9, 1B4v1, 1B4v2, 6H2, 7B11v1, 7B11v2, 18D8, 18E4v1, 18E4v2, 29F6v1, 29F6v2, 40D5v1, 40D5v2, 43B9, 44A8v1, 44A8v2, 44B4v1, and 44B4v2.

[0039] Other aspects of the present disclosure relate to an isolated (e.g., monoclonal) antibody that binds to a TREM2 protein, wherein the antibody binds essentially the same TREM2 epitope as an antibody selected from the group consisting of: 1A7, 3A2, 3B10, 6G12, 6H6, 7A9, 7B3, 8A1, 8E10, 8F11, 8F8, 9F5, 9G1, 9G3, 10A9, 10C1, 11A8, 12E2, 12F9, 12G6, 2C7, 2F5, 3C1, 4D7, 4D11, 6C11, 6G12, 7A3, 7C5, 7E9, 7F6, 7G1, 7H1, 8C3, 8F10, 12A1, 1E9, 2C5, 3C5, 4C12, 4F2, 5A2, 6B3, 7D1, 7D9, 11D8, 8A12, 10E7, 10B11, 10D2, 7D5, 2A7, 3G12, 6H9, 8G9, 9B4, 10A1, 11A8, 12F3, 2F8, 10E3, 1H7, 2F6, 2H8, 3A7, 7E5, 7F8, 11H5, 7C5, 4F11, 12D9, 1B4v1, 1B4v2, 6H2, 7B11v1, 7B11v2, 18D8, 18E4v1, 18E4v2, 29F6v1, 29F6v2, 40D5v1, 40D5v2, 43B9, 44A8v1, 44A8v2, 44B4v1, and 44B4v2.

[0040] Other aspects of the present disclosure relate to an isolated (e.g., monoclonal) antibody that binds to a TREM2 protein, wherein the antibody comprises a light chain variable domain and a heavy chain variable domain, wherein the light chain variable domain comprises: (a) an HVR-L1 comprising an amino acid sequence selected from the group consisting of SEQ ID NOs: 9-23, 581, 690-694, 734-738, and 826-828, or an amino acid sequence with at least about 90% homology to an amino acid sequence selected from the group consisting of SEQ ID NOs: 9-23, 581, 690-694, 734-738, and 826-828; (b) an HVR-L2 comprising an amino acid sequence selected from the group consisting of SEQ ID NOs: 24-33, 695-697, and 739-743, or an amino acid sequence with at least about 90% homology to an amino acid sequence selected from the group consisting of SEQ ID NOs: 24-33, 695-697, and 739-743; and (c) an HVR-L3 comprising an amino acid sequence selected from the group consisting of SEQ ID NOs: 34-47, 582, 583, 698-702, and 744-746, or an amino acid sequence with at least about 90% homology to an amino acid sequence selected from the group consisting of SEQ ID NOs: 34-47, 582, 583, 698-702, and 744-746; and wherein the heavy chain variable domain comprises: (a) an HVR-H1 comprising an amino acid sequence selected from the group consisting of SEQ ID NOs: 48-65, 584, 703-705, 747-754, and 829-835, or an amino acid sequence with at least about 90% homology to an amino acid sequence selected from the group consisting of SEQ ID NOs: 48-65, 584, 703-705, 747-754, and 829-835; (b) an HVR-H2 comprising an amino acid sequence selected from the group consisting of SEQ ID NOs: 66-84, 585-587, 706-708, 755-762, 836-842, and 888, or an amino acid sequence with at least about 90% homology to an amino acid sequence selected from the group consisting of SEQ ID NOs: 66-84, 585-587, 706-708, 755-762, 836-842, and 888; and (c) an HVR-H3 comprising an amino acid sequence selected from the group consisting of SEQ ID NOs: 85-102, 588, 589, 709, 710, and 763-770, or an amino acid sequence with at least about 90% homology to an amino acid sequence selected from the group consisting of SEQ ID NOs: 85-102, 588, 589, 709, 710, and 763-770. Other aspects of the present disclosure relate to an isolated (e.g., monoclonal) antibody that binds to a TREM2 protein, wherein the anti-TREM2 antibody comprises a light chain variable domain and a heavy chain variable domain, wherein the light chain variable domain comprises HVR-L1, HVR-L2, HVR-L3, the heavy chain variable domain comprises HVR-H1, HVR-H2, and HVR-H3, and wherein the HVR-H3 comprises an amino acid sequence selected from the group consisting of SEQ ID NOs: 85-102, 588, 589, 709, 710, and 763-770, or an amino acid sequence with at least about 90% homology to an amino acid sequence selected from the group consisting of SEQ ID NOs: 85-102, 588, 589, 709, 710, and 763-770.

[0041] In some embodiments that may be combined with any of the preceding embodiments, the antibody competes with one or more TREM2 ligands for binding to the TREM2 protein. In some embodiments that may be combined with any of the preceding embodiments, the antibody induces one or more TRME2 activities and enhances one or more TREM2 activities induced by binding of one or more TREM2 ligands to the TREM2 protein. In some embodiments that may be combined with any of the preceding embodiments, the antibody induces one or more TRME2 activities without blocking binding of the one or more TREM2 ligands to the TREM2 protein. In some embodiments that may be combined with any of the preceding embodiments, the antibody induces one or more TRME2 activities without blocking binding of one or more TREM2 ligands to the TREM2 protein. In some embodiments that may be combined with any of the preceding embodiments, the antibody enhances the one or more TREM2 activities. In some embodiments that may be combined with any of the preceding embodiments, the antibody does not compete with the one or more TREM2 ligands for binding of to the TREM2 protein. In some embodiments that may be combined with any of the preceding embodiments, the antibody enhances binding of the one or more TREM2 ligands to the TREM2 protein. In some embodiments that may be combined with any of the preceding embodiments, the antibody enhances one or more TREM2 activities induced by binding of one or more TREM2 ligands to the TREM2 protein, as compared to the one or more TREM2 activities induced by binding of the one or more TREM2 ligands to the TREM2 protein in the absence of the isolated antibody. In some embodiments that may be combined with any of the preceding embodiments, the antibody synergizes with the one or more TREM2 ligands to enhance the one or more TREM2 activities. In some embodiments that may be combined with any of the preceding embodiments, the antibody enhances the one or more TREM2 activities in the absence of cell surface clustering of TREM2. In some embodiments that may be combined with any of the preceding embodiments, the antibody enhances the one or more TREM2 activities by inducing or retaining cell surface clustering of TREM2. In some embodiments that may be combined with any of the preceding embodiments, the antibody is clustered by an Fc-gamma receptor expressed on one or more immune cells. In some embodiments that may be combined with any of the preceding embodiments, the one or more immune cells are B cells or microglial cells. In some embodiments that may be combined with any of the preceding embodiments, the antibody increases levels of soluble TREM2, increases half-life of soluble TREM2, or both. In some embodiments that may be combined with any of the preceding embodiments, the levels of soluble TREM2 are selected from the group consisting of serum levels of TREM2, cerebral spinal fluid (CSF) levels of TREM2, tissue levels of TREM2, and any combination thereof. In some embodiments that may be combined with any of the preceding embodiments, the antibody decreases levels of TREM2 in one or more cells. In some embodiments that may be combined with any of the preceding embodiments, the antibody decreases cell surface levels of TREM2, decreases intracellular levels of TREM2, decreases total levels of TREM2, or any combination thereof. In some embodiments that may be combined with any of the preceding embodiments, the antibody induces TREM2 degradation, TREM2 cleavage, TREM2 internalization, TREM2 shedding, downregulation of TREM2 expression, or any combination thereof. In some embodiments that may be combined with any of the preceding embodiments, the levels of TREM2 in one or more cells are measured in primary cells selected from the group consisting of dendritic cells, bone marrow-derived dendritic cells, monocytes, microglia, macrophages, neutrophils, NK cells, osteoclasts, Langerhans cells of skin, and Kupffer cells, or on cell lines, and wherein the cellular levels of TREM2 are measured utilizing an in vitro cell assay. In some embodiments that may be combined with any of the preceding embodiments, the TREM2 protein is a mammalian protein or a human protein. In some embodiments that may be combined with any of the preceding embodiments, the TREM2 protein is a wild-type protein. In some embodiments that may be combined with any of the preceding embodiments, the TREM2 protein is a naturally occurring variant. In some embodiments that may be combined with any of the preceding embodiments, the TREM2 protein is expressed on human dendritic cells, human macrophages, human monocytes, human osteoclasts, human Langerhans cells of skin, human Kupffer cells, human microglia, or any combination thereof. In some embodiments that may be combined with any of the preceding embodiments, the one or more TREM2 activities are selected from the group consisting of: (a) TREM2 binding to DAP12; (b) TREM2 phosphorylation; (c) DAP12 phosphorylation; (d) activation of one or more tyrosine kinases, optionally wherein the one or more tyrosine kinases comprise a Syk kinase, ZAP70 kinase, or both; (e) activation of phosphatidylinositol 3-kinase (PI3K); (f) activation of protein kinase B (Akt); (g) recruitment of phospholipase C-gamma (PLC-gamma) to a cellular plasma membrane, activation of PLC-gamma, or both; (h) recruitment of TEC-family kinase dVav to a cellular plasma membrane; (i) activation of nuclear factor-rB (NF-rB); (j) inhibition of MAPK signaling; (k) phosphorylation of linker for activation of T cells (LAT), linker for activation of B cells (LAB), or both; (l) activation of IL-2-induced tyrosine kinase (Itk); (m) modulation of one or more pro-inflammatory mediators selected from the group consisting of IFN-β, IL-1α, IL-1β, TNF-α, IL-6, IL-8, CRP, CD86, MCP-1/CCL2, CCL3, CCL4, CCL5, CCR2, CXCL-10, Gata3, IL-20 family members, IL-33, LIF, IFN-gamma, OSM, CNTF, CSF-1, OPN, CD11c, GM-CSF, IL-11, IL-12, IL-17, IL-18, and IL-23, optionally wherein the modulation occurs in one or more cells selected from the group consisting of macrophages, M1 macrophages, activated M1 macrophages, M2 macrophages, dendritic cells, monocytes, osteoclasts, Langerhans cells of skin, Kupffer cells, and microglial cells; (n) modulation of one or more anti-inflammatory mediators selected from the group consisting of IL-4, IL-10, TGF-β, IL-13, IL-35, IL-16, IFN-α, IL-1Rα, VEGF, G-CSF, YM, AXL, FLT1, and soluble receptors for TNF or IL-6, optionally wherein the modulation occurs in one or more cells selected from the group consisting of macrophages, M1 macrophages, activated M1 macrophages, M2 macrophages, dendritic cells, monocytes, osteoclasts, Langerhans cells of skin, Kupffer cells, and microglial cells; (o) modulation of one or more genes whose expression is increased upon induction of inflammation, optionally wherein the one or more genes are selected from the group consisting of Fabp3, Fabp5, and LDR; (p) phosphorylation of extracellular signal-regulated kinase (ERK); (q) modulated expression of C-C chemokine receptor 7 (CCR7) in one or more cells selected from the group consisting of macrophages, M1 macrophages, activated M1 macrophages, M2 macrophages, dendritic cells, monocytes, osteoclasts, Langerhans cells of skin, Kupffer cells, microglia, M1 microglia, activated M1 microglia, and M2 microglia, and any combination thereof; (r) induction of microglial cell chemotaxis toward CCL19 and CCL21 expressing cells; (s) normalization of disrupted TREM2/DAP12-dependent gene expression; (t) recruitment of Syk, ZAP70, or both to a DAP12/TREM2 complex; (u) increasing activity of one or more TREM2-dependent genes, optionally wherein the one or more TREM2-dependent genes comprise nuclear factor of activated T-cells (NFAT) transcription factors; (v) increased maturation of dendritic cells, monocytes, microglia, M1 microglia, activated M1 microglia, and M2 microglia, macrophages, M1 macrophages, activated M1 macrophages, M2 macrophages, or any combination thereof; (w) increased ability of dendritic cells, monocytes, microglia, M1 microglia, activated M1 microglia, and M2 microglia, macrophages, M1 macrophages, activated M1 macrophages, M2 macrophages, or any combination thereof to prime or modulate the function of T cells, optionally wherein the T cells are one or more cells selected from the group consisting of CD8+ T cells, CD4+ T cells, regulatory T cells, and any combination thereof; (x) enhanced ability, normalized ability, or both of bone marrow-derived dendritic cells to prime or modulate function of antigen-specific T cells, optionally wherein the antigen-specific T cells are one or more cells selected from the group consisting of CD8+ T cells, CD4+T cells, regulatory T cells, and any combination thereof; (y) induction of osteoclast production, increased rate of osteoclastogenesis, or both; (z) increased survival of dendritic cells, macrophages, M1 macrophages, activated M1 macrophages, M2 macrophages, monocytes, osteoclasts, Langerhans cells of skin, Kupffer cells, microglia, M1 microglia, activated M1 microglia, and M2 microglia, or any combination thereof; (aa) increasing the function of dendritic cells, macrophages, M1 macrophages, activated M1 macrophages, M2 macrophages, microglia, M1 microglia, activated M1 microglia, and M2 microglia, or any combination thereof; (bb) increasing phagocytosis by dendritic cells, macrophages, M1 macrophages, activated M1 macrophages, M2 macrophages, monocytes, microglia, M1 microglia, activated M1 microglia, and M2 microglia, or any combination thereof; (cc) induction of one or more types of clearance selected from the group consisting of apoptotic neuron clearance, nerve tissue debris clearance, non-nerve tissue debris clearance, bacteria or other foreign body clearance, disease-causing agent clearance, tumor cell clearance, or any combination thereof, optionally wherein the disease-causing agent is selected from the group consisting of amyloid beta or fragments thereof, Tau, IAPP, alpha-synuclein, TDP-43, FUS protein, prion protein, PrPSc, huntingtin, calcitonin, superoxide dismutase, ataxin, Lewy body, atrial natriuretic factor, islet amyloid polypeptide, insulin, apolipoprotein AI, serum amyloid A, medin, prolactin, transthyretin, lysozyme, beta 2 microglobulin, gelsolin, keratoepithelin, cystatin, immunoglobulin light chain AL, S-IBM protein, and Repeat-associated non-ATG (RAN) translation products including DiPeptide Repeats, (DPRs peptides) composed of glycine-alanine (GA), glycine-proline (GP), glycine-arginine (GR), proline-alanine (PA), or proline-arginine (PR), antisense GGCCCC (G2C4) repeat-expansion RNA; (dd) induction of phagocytosis of one or more of apoptotic neurons, nerve tissue debris, non-nerve tissue debris, bacteria, other foreign bodies, disease-causing agents, tumor cells, or any combination thereof, optionally wherein the disease-causing agent is selected from the group consisting of amyloid beta or fragments thereof, Tau, IAPP, alpha-synuclein, TDP-43, FUS protein, prion protein, PrPSc, huntingtin, calcitonin, superoxide dismutase, ataxin, Lewy body, atrial natriuretic factor, islet amyloid polypeptide, insulin, apolipoprotein AI, serum amyloid A, medin, prolactin, transthyretin, lysozyme, beta 2 microglobulin, gelsolin, keratoepithelin, cystatin, immunoglobulin light chain AL, S-IBM protein, and Repeat-associated non-ATG (RAN) translation products including DiPeptide Repeats, (DPRs peptides) composed of glycine-alanine (GA), glycine-proline (GP), glycine-arginine (GR), proline-alanine (PA), or proline-arginine (PR), antisense GGCCCC (G2C4) repeat-expansion RNA; (ee) increased expression of one or more stimulatory molecules selected from the group consisting of CD83, CD86 MHC class II, CD40, and any combination thereof, optionally wherein the CD40 is expressed on dendritic cells, monocytes, macrophages, or any combination thereof, and optionally wherein the dendritic cells comprise bone marrow-derived dendritic cells; (ff) modulating secretion of one or more pro-inflammatory mediators selected from the group consisting of IFN-β, IL-1α, IL-1β, CD86, TNF-α, IL-6, IL-8, CRP, MCP-1/CCL2, CCL3, CCL4, CCL5, CCR2, CXCL-10, Gata3, IL-20 family members, IL-33, LIF, IFN-gamma, OSM, CNTF, CSF-1, OPN, CD11c, GM-CSF, IL-11, IL-12, IL-17, IL-18, and IL-23, and optionally wherein the modulation occurs in one or more cells selected from the group consisting of macrophages, M1 macrophages, activated M1 macrophages, M2 macrophages, dendritic cells, monocytes, osteoclasts, Langerhans cells of skin, Kupffer cells, and microglial cells; (gg) modulating secretion of one or more anti-inflammatory mediators selected from the group consisting of IL-4, IL-10 TGF-β, IL-13, IL-35 IL-16, IFN-alpha, IL-1Ra, VEGF, G-CSF, YM, AXL, FLT1, and soluble receptors for TNF or IL-6, and optionally wherein the modulation occurs in one or more cells selected from the group consisting of macrophages, M1 macrophages, activated M1 macrophages, M2 macrophages, dendritic cells, monocytes, osteoclasts, Langerhans cells of skin, Kupffer cells, and microglial cells; (hh) modulating expression of one or more proteins selected from the group consisting of C1qa, C1qB, C1qC, C1s, C1R, C4, C2, C3, ITGB2, HMOX1, LAT2. CASP1, CSTA, VSIG4, MS4A4A, C3AR1, GPX1, TyroBP, ALOX5AP, ITGAM, SLC7A7, CD4, ITGAX, PYCARD, and VEGF; (ii) increasing memory; and (jj) reducing cognitive deficit. In some embodiments that may be combined with any of the preceding embodiments, the one or more TREM2 activities are selected from the group consisting of: (a) TREM2 binding to DAP12; (b) DAP12 phosphorylation; (c) activation of Syk kinase; (d) modulation of one or more pro-inflammatory mediators selected from the group consisting of IFN-β, IL-1α, IL-1β, TNF-α, IL-6, IL-8, CRP, CD86, MCP-1/CCL2, CCL3, CCL4, CCL5, CCR2, CXCL-10, Gata3, IL-20 family members, IL-33, LIF, IFN-gamma, OSM, CNTF, CSF-1, OPN, CD11c, GM-CSF, IL-11, IL-12, IL-17, IL-18, and IL-23, optionally wherein the modulation occurs in one or more cells selected from the group consisting of macrophages, M1 macrophages, activated M1 macrophages, M2 macrophages, dendritic cells, monocytes, osteoclasts, Langerhans cells of skin, Kupffer cells, and microglial cells; (e) recruitment of Syk to a DAP12/TREM2 complex; (f) increasing activity of one or more TREM2-dependent genes, optionally wherein the one or more TREM2-dependent genes comprise nuclear factor of activated T-cells (NFAT) transcription factors; (g) increased survival of dendritic cells, macrophages, M1 macrophages, activated M1 macrophages, M2 macrophages, monocytes, osteoclasts, Langerhans cells of skin, Kupffer cells, microglia, M1 microglia, activated M1 microglia, and M2 microglia, or any combination thereof; (h) modulated expression of one or more stimulatory molecules selected from the group consisting of CD83, CD86 MHC class II, CD40, and any combination thereof, optionally wherein the CD40 is expressed on dendritic cells, monocytes, macrophages, or any combination thereof, and optionally wherein the dendritic cells comprise bone marrow-derived dendritic cells; (i) increasing memory; and (j) reducing cognitive deficit. In some embodiments that may be combined with any of the preceding embodiments, the antibody is of the IgG class the IgM class, or the IgA class. In some embodiments that may be combined with any of the preceding embodiments, the antibody is of the IgG class and has an IgG1, IgG2, IgG3, or IgG4 isotype. In some embodiments that may be combined with any of the preceding embodiments, the antibody has an IgG2 isotype. In some embodiments that may be combined with any of the preceding embodiments, the antibody comprises a human IgG2 constant region. In some embodiments that may be combined with any of the preceding embodiments, the human IgG2 constant region comprises an Fc region. In some embodiments that may be combined with any of the preceding embodiments, the antibody enhances the one or more TREM2 activities independently of binding to an Fc receptor. In some embodiments that may be combined with any of the preceding embodiments, the antibody binds an inhibitory Fc receptor. In some embodiments that may be combined with any of the preceding embodiments, the inhibitory Fc receptor is inhibitory Fc-gamma receptor IIB (FcγIIB). In some embodiments that may be combined with any of the preceding embodiments: (a) the isolated antibody has a human or mouse IgG1 isotype and comprises one or more amino acid substitutions in the Fc region at a residue position selected from the group consisting of: N297A, D265A, D270A, L234A, L235A, G237A, C226S, C229S, E233P, L234V, L234F, L235E, P331S, S267E, L328F, A330L, M252Y, S254T, T256E, L328E, P238D, S267E, L328F, E233D, G237D, H268D, P271G, A330R, and any combination thereof, wherein the numbering of the residues is according to EU numbering, or comprises an amino acid deletion in the Fc region at a position corresponding to glycine 236; (b) the isolated antibody has an IgG1 isotype and comprises an IgG2 isotype heavy chain constant domain 1(CH1) and hinge region, optionally wherein the IgG2 isotype CH1 and hinge region comprises the amino acid sequence of ASTKGPSVFP LAPCSRSTSE STAALGCLVK DYFPEPVTVS WNSGALTSGVHTFPAVLQSS GLYSLSSVVT VPSSNFGTQT YTCNVDHKPS NTKVDKTVERKCCVECPPCP (SEQ ID NO: 886), and optionally wherein the antibody Fc region comprises a S267E amino acid substitution, a L328F amino acid substitution, or both, and/or a N297A or N297Q amino acid substitution, wherein the numbering of the residues is according to EU numbering; (c) the isolated antibody has an IgG2 isotype and comprises one or more amino acid substitutions in the Fc region at a residue position selected from the group consisting of: P238S, V234A, G237A, H268A, H268Q, V309L, A330S, P331S, C214S, C232S, C233S, S267E, L328F, M252Y, S254T, T256E, H268E, N297A, N297Q, A330L, and any combination thereof, wherein the numbering of the residues is according to EU numbering; (d) the isolated antibody has a human or mouse IgG4 isotype and comprises one or more amino acid substitutions in the Fc region at a residue position selected from the group consisting of: L235A, G237A, S228P, L236E, S267E, E318A, L328F, M252Y, S254T, T256E, E233P, F234V, L234A/F234A, S228P, S241P, L248E, T394D, N297A, N297Q, L235E, and any combination thereof, wherein the numbering of the residues is according to EU numbering; or (e) the isolated antibody has a hybrid IgG2/4 isotype, and optionally wherein the antibody comprises an amino acid sequence comprising amino acids 118 to 260 of human IgG2 and amino acids 261 to 447 of human IgG4, wherein the numbering of the residues is according to EU or, Kabat numbering. In some embodiments that may be combined with any of the preceding embodiments, the antibody is an inert antibody that binds to a TREM2 protein. In some embodiments that may be combined with any of the preceding embodiments, the antibody is an antagonist antibody that binds to a TREM2 protein. In some embodiments that may be combined with any of the preceding embodiments, the TREM2 protein is a mammalian protein or a human protein. In some embodiments that may be combined with any of the preceding embodiments, the TREM2 protein is a wild-type protein. In some embodiments that may be combined with any of the preceding embodiments, the TREM2 protein is a naturally occurring variant. In some embodiments that may be combined with any of the preceding embodiments, the TREM2 protein is a disease variant. In some embodiments that may be combined with any of the preceding embodiments, the antibody inhibits one or more TREM2 activities. In some embodiments that may be combined with any of the preceding embodiments, the one or more TREM2 activities are selected from the group consisting of: (a) TREM2 binding to DAP12; (b) TREM2 phosphorylation; (c) DAP12 phosphorylation; (d) activation of one or more tyrosine kinases, optionally wherein the one or more tyrosine kinases comprise a Syk kinase, ZAP70 kinase, or both; (e) activation of phosphatidylinositol 3-kinase (PI3K); (f) activation of protein kinase B (Akt); (g) recruitment of phospholipase C-gamma (PLC-gamma) to a cellular plasma membrane, activation of PLC-gamma, or both; (h) recruitment of TEC-family kinase dVav to a cellular plasma membrane; (i) activation of nuclear factor-rB (NF-rB); (j) inhibition of MAPK signaling; (k) phosphorylation of linker for activation of T cells (LAT), linker for activation of B cells (LAB), or both; (1) activation of IL-2-induced tyrosine kinase (Itk); (m) modulation of one or more pro-inflammatory mediators selected from the group consisting of IFN-β, IL-1α, IL-1β, TNF-α, IL-6, IL-8, CRP, CD86, MCP-1/CCL2, CCL3, CCL4, CCL5, CCR2, CXCL-10, Gata3, IL-20 family members, IL-33, LIF, IFN-gamma, OSM, CNTF, CSF-1, OPN, CD11c, GM-CSF, IL-11, IL-12, IL-17, IL-18, and IL-23, optionally wherein the modulation occurs in one or more cells selected from the group consisting of macrophages, M1 macrophages, activated M1 macrophages, M2 macrophages, dendritic cells, monocytes, osteoclasts, Langerhans cells of skin, Kupffer cells, and microglial cells; (n) modulation of one or more anti-inflammatory mediators selected from the group consisting of IL-4, IL-10 TGF-β, IL-13, IL-35 IL-16, IFN-alpha, IL-1Ra, VEGF, G-CSF, YM, AXL, FLT1 and soluble receptors for TNF or IL-6, optionally wherein the modulation occurs in one or more cells selected from the group consisting of macrophages, M1 macrophages, activated M1 macrophages, M2 macrophages, dendritic cells, monocytes, osteoclasts, Langerhans cells of skin, Kupffer cells, and microglial cells; (o) modulation of one or more genes whose expression is increased upon induction of inflammation, optionally wherein the one or more genes are selected from the group consisting of Fabp3, Fabp5, and LDR; (p) phosphorylation of extracellular signal-regulated kinase (ERK); (q) increased expression of C-C chemokine receptor 7 (CCR7) in one or more cells selected from the group consisting of macrophages, M1 macrophages, activated M1 macrophages, M2 macrophages, dendritic cells, monocytes, osteoclasts, Langerhans cells of skin, Kupffer cells, microglia, M1 microglia, activated M1 microglia, and M2 microglia, and any combination thereof; (r) induction of microglial cell chemotaxis toward CCL19 and CCL21 expressing cells; (s) normalization of disrupted TREM2/DAP12-dependent gene expression; (t) recruitment of Syk, ZAP70, or both to a DAP12/TREM2 complex; (u) increasing activity of one or more TREM2-dependent genes, optionally wherein the one or more TREM2-dependent genes comprise nuclear factor of activated T-cells (NFAT) transcription factors; (v) promoting proliferation, maturation, migration, differentiation, or functionality of one or more cells selected from the group consisting of immunosuppressor dendritic cells, immunosuppressor macrophages, immunosuppressor neutrophils, immunosuppressor NK cells, myeloid derived suppressor cells, tumor-associated macrophages, tumor-associated suppressor neutrophils, tumor-associated suppressor NK cells, regulatory T cells, and any combination thereof; (w) enhancing infiltration into tumors of one or more cells selected from the group consisting of immunosuppressor dendritic cells, immunosuppressor macrophages, immunosuppressor neutrophils, immunosuppressor NK cells, myeloid-derived suppressor cells, tumor-associated macrophages, tumor-associated suppressor neutrophils, tumor-associated suppressor NK cells, regulatory T cells, and any combination thereof; (x) increasing number of tumor-promoting myeloid immunosuppressor or tumor-promoting granulocytic immunosuppressor cells in a tumor, peripheral blood, lymphoid organ, or any combination thereof; (y) enhancing tumor-promoting activity of myeloid-derived suppressor cells (MDSC); (z) increasing expression of tumor-promoting cytokines in a tumor or in peripheral blood, optionally wherein the tumor-promoting cytokines are selected from the group consisting of TGF-beta, IL-10, and any combination thereof; (aa) increasing tumor infiltration of tumor-promoting FoxP3+ regulatory T lymphocytes; (bb) decreasing activation of tumor-specific T lymphocytes with tumor-killing potential; (cc) decreasing infiltration of one of more cells selected from the group consisting of tumor-specific T lymphocytes with tumor killing potential, tumor-specific NK cells with tumor killing potential, tumor-specific B lymphocytes with potential to enhance immune response, and any combination thereof; (dd) increasing tumor volume; (ee) increasing tumor growth rate; (ff) increasing metastasis; (gg) increasing rate of tumor recurrence; (hh) decreasing efficacy of one or more immunotherapies that modulate anti-tumor T cell responses, optionally wherein the one or more immunotherapies are selected from the group consisting of PD1/PDL1 blockade, CTLA-4 blockade, and cancer vaccines; (ii) inhibition of PLCγ/PKC/calcium mobilization; and (jj) inhibition of PI3K/Akt, Ras/MAPK signaling. In some embodiments that may be combined with any of the preceding embodiments, the one or more TREM2 activities are selected from the group consisting of: (a) TREM2 binding to DAP12; (b) DAP12 phosphorylation; (c) activation of Syk kinase; (d) recruitment of Syk to a DAP12/TREM2 complex; (e) increasing activity of one or more TREM2-dependent genes, optionally wherein the one or more TREM2-dependent genes comprise nuclear factor of activated T-cells (NFAT) transcription factors; (f) increasing tumor volume; and (g) increasing tumor growth rate. In some embodiments that may be combined with any of the preceding embodiments, the antibody inhibits interaction between TREM2 and one or more TREM2 ligands, inhibits TREM2 signal transduction, or both. In some embodiments that may be combined with any of the preceding embodiments, the antibody is incapable of binding an Fc-gamma receptor (FcγR). In some embodiments that may be combined with any of the preceding embodiments, the antibody has an IgG1, IgG2, IgG3, or IgG4 isotype. In some embodiments that may be combined with any of the preceding embodiments: (a) the antibody has a human or mouse IgG1 isotype and comprises one or more amino acid substitutions in the Fc region at a residue position selected from the group consisting of: N297A, N297Q, D270A, D265A, L234A, L235A, C226S, C229S, P238S, E233P, L234V, P238A, A327Q, A327G, P329A, K322A, L234F, L235E, P331S, T394D, A330L, M252Y, S254T, T256E, L328E, P238D, S267E, L328F, E233D, G237D, H268D, P271G, A330R, and any combination thereof, wherein the numbering of the residues is according to EU numbering, or comprises an amino acid deletion in the Fc region at a position corresponding to glycine 236; (b) the antibody has an IgG2 isotype and comprises one or more amino acid substitutions in the Fc region at a residue position selected from the group consisting of: P238S, V234A, G237A, H268A, H268Q, H268E, V309L, N297A, N297Q, A330S, P331S, C232S, C233S, M252Y, S254T, T256E, and any combination thereof, wherein the numbering of the residues is according to EU numbering; or (c) the antibody has an IgG4 isotype and comprises one or more amino acid substitutions in the Fc region at a residue position selected from the group consisting of: E233P, F234V, L234A/F234A, L235A, G237A, E318A, S228P, L236E, S241P, L248E, T394D, M252Y, S254T, T256E, N297A, N297Q, and any combination thereof, wherein the numbering of the residues is according to EU numbering. In some embodiments that may be combined with any of the preceding embodiments: (a) the Fc region further comprises one or more additional amino acid substitutions at a position selected from the group consisting of A330L, L234F; L235E, P331S, and any combination thereof, wherein the numbering of the residues is according to EU numbering; (b) the Fc region further comprises one or more additional amino acid substitutions at a position selected from the group consisting of M252Y, S254T, T256E, and any combination thereof, wherein the numbering of the residues is according to EU numbering; or (c) the Fc region further comprises a S228P amino acid substitution according to EU numbering. In some embodiments that may be combined with any of the preceding embodiments, the antibody is an antibody fragment that binds to one or more human proteins selected from the group consisting of human TREM2, a naturally occurring variant of human TREM2, and a disease variant of human TREM2, and optionally wherein the antibody fragment is cross-linked to a second antibody fragment that binds to one or more human proteins selected from the group consisting of human TREM2, a naturally occurring variant of human TREM2, and a disease variant of human TREM2. In some embodiments that may be combined with any of the preceding embodiments, the fragment is an Fab, Fab′, Fab′-SH, F(ab′)2, Fv or scFv fragment. In some embodiments that may be combined with any of the preceding embodiments, the one or more TREM2 ligands are selected from the group consisting of E. coli cells, apoptotic cells, nucleic acids, anionic lipids, anionic lipids, APOE, APOE2, APOE3, APOE4, anionic APOE, anionic APOE2, anionic APOE3, anionic APOE4, lipidated APOE, lipidated APOE2, lipidated APOE3, lipidated APOE4, zwitterionic lipids, negatively charged phospholipids, phosphatidylserine, sulfatides, phosphatidylcholin, sphingomyelin, membrane phospholipids, lipidated proteins, proteolipids, lipidated peptides, lipidated amyloid beta peptide, and any combination thereof. In some embodiments that may be combined with any of the preceding embodiments, the antibody is a murine antibody. In some embodiments that may be combined with any of the preceding embodiments, the antibody is a humanized antibody, a bispecific antibody, a multivalent antibody, a conjugated antibody, or a chimeric antibody. In some embodiments that may be combined with any of the preceding embodiments, the antibody is a monoclonal antibody. In some embodiments that may be combined with any of the preceding embodiments, the antibody is a bispecific antibody recognizing a first antigen and a second antigen. In some embodiments that may be combined with any of the preceding embodiments, the first antigen is human TREM2 or a naturally occurring variant thereof, and the second antigen is: (a) an antigen facilitating transport across the blood-brain-barrier; (b) an antigen facilitating transport across the blood-brain-barrier selected from the group consisting of transferrin receptor (TR), insulin receptor (HIR), insulin-like growth factor receptor (IGFR), low-density lipoprotein receptor related proteins 1 and 2 (LPR-1 and 2), diphtheria toxin receptor, CRM197, a llama single domain antibody, TMEM 30(A), a protein transduction domain, TAT, Syn-B, penetratin, a poly-arginine peptide, an angiopeptide, and ANG1005; (c) a disease-causing agent selected from the group consisting of disease-causing peptides or proteins or, disease-causing nucleic acids, wherein the disease-causing nucleic acids are antisense GGCCCC (G2C4) repeat-expansion RNA, the disease-causing proteins are selected from the group consisting of amyloid beta, oligomeric amyloid beta, amyloid beta plaques, amyloid precursor protein or fragments thereof, Tau, IAPP, alpha-synuclein, TDP-43, FUS protein, C9orf72 (chromosome 9 open reading frame 72), c9R AN protein, prion protein, PrPSc, huntingtin, calcitonin, superoxide dismutase, ataxin, ataxin 1, ataxin 2, ataxin 3, ataxin 7, ataxin 8, ataxin 10, Lewy body, atrial natriuretic factor, islet amyloid polypeptide, insulin, apolipoprotein AI, serum amyloid A, medin, prolactin, transthyretin, lysozyme, beta 2 microglobulin, gelsolin, keratoepithelin, cystatin, immunoglobulin light chain AL, S-IBM protein, Repeat-associated non-ATG (RAN) translation products, DiPeptide repeat (DPR) peptides, glycine-alanine (GA) repeat peptides, glycine-proline (GP) repeat peptides, glycine-arginine (GR) repeat peptides, proline-alanine (PA) repeat peptides, ubiquitin, and proline-arginine (PR) repeat peptides; (d) ligands and/or proteins expressed on immune cells, wherein the ligands and/or proteins selected from the group consisting of CD40, OX40, ICOS, CD28, CD137/4-1BB, CD27, GITR, PD-L1, CTLA-4, PD-L2, PD-1, B7-H3, B7-H4, HVEM, BTLA, KIR, GAL9, TIM3, A2AR, LAG-3, and phosphatidylserine; and (e) a protein, lipid, polysaccharide, or glycolipid expressed on one or more tumor cells. In some embodiments that may be combined with any of the preceding embodiments, the antibody is used in combination with one or more antibodies that specifically bind a disease-causing agent selected from the group consisting of disease-causing peptides, disease-causing proteins, amyloid beta, oligomeric amyloid beta, amyloid beta plaques, amyloid precursor protein or fragments thereof, Tau, IAPP, alpha-synuclein, TDP-43, FUS protein, C9orf72 (chromosome 9 open reading frame 72), prion protein, PrPSc, huntingtin, calcitonin, superoxide dismutase, ataxin, ataxin 1, ataxin 2, ataxin 3, ataxin 7, ataxin 8, ataxin 10, Lewy body, atrial natriuretic factor, islet amyloid polypeptide, insulin, apolipoprotein AI, serum amyloid A, medin, prolactin, transthyretin, lysozyme, beta 2 microglobulin, gelsolin, keratoepithelin, cystatin, immunoglobulin light chain AL, S-IBM protein, Repeat-associated non-ATG (RAN) translation products, DiPeptide repeat (DPR) peptides, glycine-alanine (GA) repeat peptides, glycine-proline (GP) repeat peptides, glycine-arginine (GR) repeat peptides, proline-alanine (PA) repeat peptides, ubiquitin, and proline-arginine (PR) repeat peptides, and any combination thereof; or with one or more antibodies that bind an immunomodulatory protein selected from the group consisting of: CD40, OX40, ICOS, CD28, CD137/4-1BB, CD27, GITR, PD-L1, CTLA-4, PD-L2, PD-1, B7-H3, B7-H4, HVEM, BTLA, KIR, GAL9, TIM3, A2AR, LAG-3, TREM1, TREM2, CD33, Siglec-5, Siglec-9, Siglec-11, phosphatidylserine, disease-causing nucleic acids, antisense GGCCCC (G2C4) repeat-expansion RNA, and any combination thereof. In some embodiments that may be combined with any of the preceding embodiments, when administered to an individual increases memory, reduces cognitive deficit, or both. In some embodiments that may be combined with any of the preceding embodiments, the antibody binds specifically to both human TREM2 and mouse TREM2. In some embodiments that may be combined with any of the preceding embodiments, the antibody has dissociation constant (K_{D}) for human TREM2 and mouseTREM2 that ranges from about 12.8 nM to about 1.2 nM, or less than 1.2 nM. In some embodiments that may be combined with any of the preceding embodiments, the antibody has dissociation constant (K_{D}) for human TREM2 that ranges from about 12.8 nM to about 2.9 nM, or less than 2.9 nM. In some embodiments that may be combined with any of the preceding embodiments, the antibody has dissociation constant (K_{D}) for mouse TREM2 that ranges from about 10.4 nM to about 1.2 nM, or less than 1.2 nM. In some embodiments that may be combined with any of the preceding embodiments, the K_{D} is determined at a temperature of approximately 4° C. In some embodiments that may be combined with any of the preceding embodiments, the antibody does not inhibit the growth of innate immune cells. In some embodiments that may be combined with any of the preceding embodiments, the antibody binds to primary immune cells with a K_{D} of less than 1 nM. In some embodiments that may be combined with any of the preceding embodiments, the antibody accumulates in the brain, or the cerebrospinal fluid (CSF), or both to an extent that is 1% or more of the concentration of the antibody in the blood. In some embodiments that may be combined with any of the preceding embodiments, the antibody accumulates in the brain, or the cerebrospinal fluid (CSF), or both to an extent that is 2% or more of the concentration of the antibody in the blood. In some embodiments that may be combined with any of the preceding embodiments, the antibody accumulates in the brain, or the cerebrospinal fluid (CSF), or both to an extent that is 3% or more of the concentration of the antibody in the blood. In some embodiments that may be combined with any of the preceding embodiments, the antibody accumulates in the brain, or the cerebrospinal fluid (CSF), or both to an extent that is 4% or more of the concentration of the antibody in the blood.

[0042] Other aspects of the present disclosure relate to an isolated nucleic acid comprising a nucleic acid sequence encoding the antibody of any one of the preceding embodiments. Other aspects of the present disclosure relate to a vector comprising the nucleic acid of any of the preceding embodiments. Other aspects of the present disclosure relate to an isolated host cell comprising the vector of any of the preceding embodiments. Other aspects of the present disclosure relate to a method of producing an antibody that binds to TREM2, comprising culturing the host cell of any of the preceding embodiments so that the antibody is produced. In some embodiments, the method further comprising recovering the antibody produced by the cell. Other aspects of the present disclosure relate to an isolated (e.g., monoclonal) antibody that binds to TREM2 produced by the method of any of the preceding embodiments. Other aspects of the present disclosure relate to a pharmaceutical composition comprising the antibody of any of the preceding embodiments and a pharmaceutically acceptable carrier.

[0043] Other aspects of the present disclosure relate to a method of preventing, reducing risk, or treating an individual having a disease, disorder, or injury selected from the group consisting of dementia, frontotemporal dementia, Alzheimer's disease, vascular dementia, mixed dementia, Creutzfeldt-Jakob disease, normal pressure hydrocephalus, amyotrophic lateral sclerosis, Huntington's disease, taupathy disease, Nasu-Hakola disease, stroke, acute trauma, chronic trauma, cognitive deficit, memory loss, lupus, acute and chronic colitis, rheumatoid arthritis, wound healing, Crohn's disease, inflammatory bowel disease, ulcerative colitis, obesity, malaria, essential tremor, central nervous system lupus, Behcet's disease, Parkinson's disease, dementia with Lewy bodies, multiple system atrophy, Shy-Drager syndrome, progressive supranuclear palsy, cortical basal ganglionic degeneration, acute disseminated encephalomyelitis, granulomartous disorders, sarcoidosis, diseases of aging, seizures, spinal cord injury, traumatic brain injury, age related macular degeneration, glaucoma, retinitis pigmentosa, retinal degeneration, respiratory tract infection, sepsis, eye infection, systemic infection, lupus, arthritis, multiple sclerosis, low bone density, osteoporosis, osteogenesis, osteopetrotic disease, Paget's disease of bone, bladder cancer, brain cancer, breast cancer, colon cancer, rectal cancer, endometrial cancer, kidney cancer, renal cell cancer, renal pelvis cancer, leukemia, lung cancer, melanoma, non-Hodgkin's lymphoma, pancreatic cancer, prostate cancer, ovarian cancer, fibrosarcoma, acute lymphoblastic leukemia (ALL), acute myeloid leukemia (AML), chronic lymphocytic leukemia (CLL), chronic myeloid leukemia (CML), multiple myeloma, polycythemia vera, essential thrombocytosis, primary or idiopathic myelofibrosis, primary or idiopathic myelosclerosis, myeloid-derived tumors, thyroid cancer, infections, CNS herpes, parasitic infections, Trypanosome infection, Cruzi infection, Pseudomonas aeruginosa infection, Leishmania donovani infection, group B Streptococcus infection, Campylobacter jejuni infection, Neisseria meningiditis infection, type I HIV, and Haemophilus influenza, comprising administering to an individual in need thereof a therapeutically effective amount of an isolated (e.g., monoclonal) antibody that binds to a TREM2 protein. Other aspects of the present disclosure relate to an isolated (e.g., monoclonal) antibody that binds to a TREM2 protein for use in preventing, reducing risk, or treating an individual having a disease, disorder, or injury selected from the group consisting of dementia, frontotemporal dementia, Alzheimer's disease, vascular dementia, mixed dementia, Creutzfeldt-Jakob disease, normal pressure hydrocephalus, amyotrophic lateral sclerosis, Huntington's disease, taupathy disease, Nasu-Hakola disease, stroke, acute trauma, chronic trauma, cognitive deficit, memory loss, lupus, acute and chronic colitis, rheumatoid arthritis, wound healing, Crohn's disease, inflammatory bowel disease, ulcerative colitis, obesity, malaria, essential tremor, central nervous system lupus, Behcet's disease, Parkinson's disease, dementia with Lewy bodies, multiple system atrophy, Shy-Drager syndrome, progressive supranuclear palsy, cortical basal ganglionic degeneration, acute disseminated encephalomyelitis, granulomartous disorders, sarcoidosis, diseases of aging, seizures, spinal cord injury, traumatic brain injury, age related macular degeneration, glaucoma, retinitis pigmentosa, retinal degeneration, respiratory tract infection, sepsis, eye infection, systemic infection, lupus, arthritis, multiple sclerosis, low bone density, osteoporosis, osteogenesis, osteopetrotic disease, Paget's disease of bone, bladder cancer, brain cancer, breast cancer, colon cancer, rectal cancer, endometrial cancer, kidney cancer, renal cell cancer, renal pelvis cancer, leukemia, lung cancer, melanoma, non-Hodgkin's lymphoma, pancreatic cancer, prostate cancer, ovarian cancer, fibrosarcoma, acute lymphoblastic leukemia (ALL), acute myeloid leukemia (AML), chronic lymphocytic leukemia (CLL), chronic myeloid leukemia (CML), multiple myeloma, polycythemia vera, essential thrombocytosis, primary or idiopathic myelofibrosis, primary or idiopathic myelosclerosis, myeloid-derived tumors, thyroid cancer, infections, CNS herpes, parasitic infections, Trypanosome infection, Cruzi infection, Pseudomonas aeruginosa infection, Leishmania donovani infection, group B Streptococcus infection, Campylobacter jejuni infection, Neisseria meningiditis infection, type I HIV, and Haemophilus influenza. Other aspects of the present disclosure relate to use of an isolated (e.g., monoclonal) antibody that binds to a TREM2 protein in the manufacture of a medicament for preventing, reducing risk, or treating an individual having a disease, disorder, or injury selected from the group consisting of dementia, frontotemporal dementia, Alzheimer's disease, vascular dementia, mixed dementia, Creutzfeldt-Jakob disease, normal pressure hydrocephalus, amyotrophic lateral sclerosis, Huntington's disease, taupathy disease, Nasu-Hakola disease, stroke, acute trauma, chronic trauma, cognitive deficit, memory loss, lupus, acute and chronic colitis, rheumatoid arthritis, wound healing, Crohn's disease, inflammatory bowel disease, ulcerative colitis, obesity, malaria, essential tremor, central nervous system lupus, Behcet's disease, Parkinson's disease, dementia with Lewy bodies, multiple system atrophy, Shy-Drager syndrome, progressive supranuclear palsy, cortical basal ganglionic degeneration, acute disseminated encephalomyelitis, granulomartous disorders, sarcoidosis, diseases of aging, seizures, spinal cord injury, traumatic brain injury, age related macular degeneration, glaucoma, retinitis pigmentosa, retinal degeneration, respiratory tract infection, sepsis, eye infection, systemic infection, lupus, arthritis, multiple sclerosis, low bone density, osteoporosis, osteogenesis, osteopetrotic disease, Paget's disease of bone, bladder cancer, brain cancer, breast cancer, colon cancer, rectal cancer, endometrial cancer, kidney cancer, renal cell cancer, renal pelvis cancer, leukemia, lung cancer, melanoma, non-Hodgkin's lymphoma, pancreatic cancer, prostate cancer, ovarian cancer, fibrosarcoma, acute lymphoblastic leukemia (ALL), acute myeloid leukemia (AML), chronic lymphocytic leukemia (CLL), chronic myeloid leukemia (CML), multiple myeloma, polycythemia vera, essential thrombocytosis, primary or idiopathic myelofibrosis, primary or idiopathic myelosclerosis, myeloid-derived tumors, thyroid cancer, infections, CNS herpes, parasitic infections, Trypanosome infection, Cruzi infection, Pseudomonas aeruginosa infection, Leishmania donovani infection, group B Streptococcus infection, Campylobacter jejuni infection, Neisseria meningiditis infection, type I HIV, and Haemophilus influenza. Other aspects of the present disclosure relate to a method of preventing, reducing risk, or treating an individual having a disease, disorder, or injury selected from the group consisting of dementia, frontotemporal dementia, Alzheimer's disease, Nasu-Hakola disease, cognitive deficit, memory loss, spinal cord injury, traumatic brain injury, multiple sclerosis, chronic colitis, ulcerative colitis in and cancer, comprising administering to an individual in need thereof a therapeutically effective amount of an isolated (e.g., monoclonal) antibody that binds to a TREM2 protein. Other aspects of the present disclosure relate to an isolated (e.g., monoclonal) antibody that binds to a TREM2 protein for use in preventing, reducing risk, or treating an individual having a disease, disorder, or injury selected from the group consisting of dementia, frontotemporal dementia, Alzheimer's disease, Nasu-Hakola disease, cognitive deficit, memory loss, spinal cord injury, traumatic brain injury, multiple sclerosis, chronic colitis, ulcerative colitis in and cancer. Other aspects of the present disclosure relate to use of an isolated (e.g., monoclonal) antibody that binds to a TREM2 protein in the manufacture of a medicament for preventing, reducing risk, or treating an individual having a disease, disorder, or injury selected from the group consisting of dementia, frontotemporal dementia, Alzheimer's disease, Nasu-Hakola disease, cognitive deficit, memory loss, spinal cord injury, traumatic brain injury, multiple sclerosis, chronic colitis, ulcerative colitis in and cancer. In some embodiments, the isolated antibody is: (a) an agonist antibody; (b) an inert antibody; or (c) an antagonist antibody. In some embodiments, the isolated antibody is the antibody of any of the preceding embodiments. In some embodiments, the disease, disorder, or injury is Alzheimer's disease. In some embodiments, the isolated antibody that binds to a TREM2 protein increases expression of one or more inflammatory mediators, wherein the one or more inflammatory mediators are selected from the group consisting of IL-1β, TNF-α, YM-1, CD86, CCL2, CCL3, CCL5, CCR2, CXCL10, Gata3, Rorc, and any combination thereof. hi some embodiments, the isolated antibody that binds to a TREM2 protein decreases expression of one or more inflammatory mediators, wherein the one or more inflammatory mediators are selected from the group consisting of FLT1, OPN, CSF-1, CD11c, AXL, and any combination thereof. In some embodiments, the isolated antibody that binds to a TREM2 protein decreases levels of Abeta peptide in the individual. In some embodiments, the isolated antibody that binds to a TREM2 protein increases the number of CD11b⁺ microglial cells in the brain of the individual. In some embodiments, the isolated antibody that binds to a TREM2 protein increases memory of the individual. In some embodiments, the isolated antibody that binds to a TREM2 protein reduces cognitive deficit in the individual. In some embodiments, the isolated antibody that binds to a TREM2 protein increases motor coordination in the individual. In some embodiments, the method further comprises administering to the individual at least one antibody that specifically binds to an inhibitory checkpoint molecule, and/or another standard or investigational anti-cancer therapy. In some embodiments, the at least one antibody that specifically binds to an inhibitory checkpoint molecule is administered in combination with the isolated antibody. In some embodiments, the at least one antibody that specifically binds to an inhibitory checkpoint molecule is selected from the group consisting of an anti-PD-L1 antibody, an anti-CTLA-4 antibody, an anti-PD-L2 antibody, an anti-PD-1 antibody, an anti-B7-H3 antibody, an anti-B7-H4 antibody, and anti-HVEM antibody, an anti-B- and T-lymphocyte attenuator (BTLA) antibody, an anti-Killer inhibitory receptor (KIR) antibody, an anti-GALS antibody, an anti-TIM3 antibody, an anti-A2AR antibody, an anti-LAG-3 antibody, an anti-phosphatidylserine antibody, an anti-CD27 antibody, and any combination thereof. In some embodiments, the standard or investigational anti-cancer therapy is one or more therapies selected from the group consisting of radiotherapy, cytotoxic chemotherapy, targeted therapy, hormonal therapy, imatinib (Gleevec®), trastuzumab (Herceptin®), bevacizumab (Avastin®), Ofatumumab (Arzerra®), Rituximab (Rituxan®, MabThera®, Zytux®), cryotherapy, ablation, radiofrequency ablation, adoptive cell transfer (ACT), chimeric antigen receptor T cell transfer (CAR-T), vaccine therapy, and cytokine therapy. In some embodiments, the method further comprises administering to the individual at least one antibody that specifically binds to an inhibitory cytokine. In some embodiments, the at least one antibody that specifically binds to an inhibitory cytokine is administered in combination with the isolated antibody. In some embodiments, the at least one antibody that specifically binds to an inhibitory cytokine is selected from the group consisting of an anti-CCL2 antibody, an anti-CSF-1 antibody, an anti-IL-2 antibody, and any combination thereof. In some embodiments, the method further comprises administering to the individual at least one agonistic antibody that specifically binds to a stimulatory checkpoint protein. In some embodiments, the at least one agonistic antibody that specifically binds to a stimulatory checkpoint protein is administered in combination with the isolated antibody. In some embodiments, the at least one agonistic antibody that specifically binds to a stimulatory checkpoint protein is selected from the group consisting of an agonist anti-CD40 antibody, an agonist anti-OX40 antibody, an agonist anti-ICOS antibody, an agonist anti-CD28 antibody, an agonist anti-CD137/4-1BB antibody, an agonist anti-CD27 antibody, an agonist anti-glucocorticoid-induced TNFR-related protein GITR antibody, and any combination thereof. In some embodiments, the method further comprises administering to the individual at least one stimulatory cytokine. In some embodiments, the at least one stimulatory cytokine is administered in combination with the isolated antibody. In some embodiments, the at least one stimulatory cytokine is selected from the group consisting of TNF-α, IL-10, IL-6, IL-8, CRP, TGF-beta members of the chemokine protein families, IL20 family member, IL-33, LIF, OSM, CNTF, TGF-beta, IL-11, IL-12, IL-17, IL-8, IL-23, IFN-α, IFN-β, IL-2, IL-18, GM-CSF, G-CSF, and any combination thereof.

[0044] Other aspects of the present disclosure relate to a method of enhancing one or more TREM2 activities induced by binding of one or more TREM2 ligands to a TREM2 protein in an individual in need thereof, comprising administering to the individual a therapeutically effective amount of an isolated (e.g., monoclonal) antibody that binds to a TREM2 protein. Other aspects of the present disclosure relate to an isolated (e.g., monoclonal) antibody that binds to a TREM2 protein for use in enhancing one or more TREM2 activities induced by binding of one or more TREM2 ligands to a TREM2 protein in an individual in need thereof. Other aspects of the present disclosure relate to use of an isolated (e.g., monoclonal) antibody that binds to a TREM2 protein in the manufacture of a medicament for enhancing one or more TREM2 activities induced by binding of one or more TREM2 ligands to a TREM2 protein in an individual in need thereof. In some embodiments, the isolated antibody is the antibody of any of the preceding embodiments.

[0045] Other aspects of the present disclosure relate to a method of inducing one or more TREM2 activities in an individual in need thereof, comprising administering to the individual a therapeutically effective amount of an isolated (e.g., monoclonal) antibody that binds to a TREM2 protein. Other aspects of the present disclosure relate to an isolated (e.g., monoclonal) antibody that binds to a TREM2 protein for use in inducing one or more TREM2 activities in an individual in need thereof. Other aspects of the present disclosure relate to use of an isolated (e.g., monoclonal) antibody that binds to a TREM2 protein in the manufacture of a medicament for inducing one or more TREM2 activities in an individual in need thereof. In some embodiments, the isolated antibody is the antibody of any of the preceding embodiments.

[0046] Other aspects of the present disclosure relate to a method of inducing one or more TREM2 activities and enhancing one or more TREM2 activities induced by binding of one or more TREM2 ligands to a TREM2 protein in an individual in need thereof, comprising administering to the individual a therapeutically effective amount of an isolated (e.g., monoclonal) antibody that binds to a TREM2 protein. Other aspects of the present disclosure relate to an isolated (e.g., monoclonal) antibody that binds to a TREM2 protein for use in inducing one or more TREM2 activities and enhancing one or more TREM2 activities induced by binding of one or more TREM2 ligands to a TREM2 protein in an individual in need thereof. Other aspects of the present disclosure relate to use of an isolated (e.g., monoclonal) antibody that binds to a TREM2 protein in the manufacture of a medicament for inducing one or more TREM2 activities and enhancing one or more TREM2 activities induced by binding of one or more TREM2 ligands to a TREM2 protein in an individual in need thereof. In some embodiments, the isolated antibody is the antibody of any of the preceding embodiments.

[0047] Other aspects of the present disclosure relate to a method of decreasing cellular levels of TREM2 in one or more cells in an individual in need thereof, comprising administering to the individual a therapeutically effective amount of an isolated (e.g., monoclonal) antibody that binds to a TREM2 protein. Other aspects of the present disclosure relate to an isolated (e.g., monoclonal) antibody that binds to a TREM2 protein for use in decreasing cellular levels of TREM2 in one or more cells in an individual in need thereof. Other aspects of the present disclosure relate to use of an isolated (e.g., monoclonal) antibody that binds to a TREM2 protein in the manufacture of a medicament for decreasing cellular levels of TREM2 in one or more cells in an individual in need thereof. In some embodiments, the isolated antibody is the antibody of any of the preceding embodiments.

[0048] In some embodiments that may be combined with any of the preceding embodiments, the individual has a heterozygous variant of TREM2, wherein the variant comprises one or more substitutions selected from the group consisting of: i. a glutamic acid to stop codon substitution in the nucleic acid sequence encoding amino acid residue Glu14 of SEQ ID NO: 1; ii. a glutamine to stop codon substitution in the nucleic acid sequence encoding amino acid residue Gln33 of SEQ ID NO: 1; iii. a tryptophan to stop codon substitution in the nucleic acid sequence encoding amino acid residue Trp44 of SEQ ID NO: 1; iv. an arginine to histidine amino acid substitution at an amino acid corresponding to amino acid residue Arg47 of SEQ ID NO: 1; v. a tryptophan to stop codon substitution in the nucleic acid sequence encoding amino acid residue Trp78 of SEQ ID NO: 1; vi. a valine to glycine amino acid substitution at an amino acid corresponding to amino acid residue Va1126 of SEQ ID NO: 1; vii. an aspartic acid to glycine amino acid substitution at an amino acid corresponding to amino acid residue Asp134 of SEQ ID NO: 1; and viii. a lysine to asparagine amino acid substitution at an amino acid corresponding to amino acid residue Lys186 of SEQ ID NO: 1. In some embodiments that may be combined with any of the preceding embodiments, the individual has a heterozygous variant of TREM2, wherein the variant comprises a guanine nucleotide deletion at a nucleotide corresponding to nucleotide residue G313 of the nucleic acid sequence encoding SEQ ID NO: 1; a guanine nucleotide deletion at a nucleotide corresponding to nucleotide residue G267 of the nucleic acid sequence encoding SEQ ID NO: 1; or both. In some embodiments that may be combined with any of the preceding embodiments, the individual has a heterozygous variant of DAP12, wherein the variant comprises one or more variants selected from the group consisting of: i. a methionine to threonine substitution at an amino acid corresponding to amino acid residue Mal of SEQ ID NO: 2; ii. a glycine to arginine amino acid substitution at an amino acid corresponding to amino acid residue Gly49 of SEQ ID NO: 2; iii. a deletion within exons 1-4 of the nucleic acid sequence encoding SEQ ID NO: 2; iv. an insertion of 14 amino acid residues at exon 3 of the nucleic acid sequence encoding SEQ ID NO: 2; and v. a guanine nucleotide deletion at a nucleotide corresponding to nucleotide residue G141 of the nucleic acid sequence encoding SEQ ID NO: 2.

[0049] Other aspects of the present disclosure relate to a method of inducing or promoting innate immune cell survival or wound healing an individual in need thereof, comprising administering to the individual a therapeutically effective amount of an isolated agonist antibody that binds to a TREM2 protein. Other aspects of the present disclosure relate to an isolated agonist antibody that binds to a TREM2 protein for use in inducing or promoting innate immune cell survival or wound healing an individual in need thereof. Other aspects of the present disclosure relate to use of an isolated agonist antibody that binds to a TREM2 protein in the manufacture of a medicament for inducing or promoting innate immune cell survival or wound healing an individual in need thereof. In some embodiments, the isolated agonist antibody is the agonist antibody of any of the preceding embodiments.

[0050] Other aspects of the present disclosure relate to a method of increasing memory, reducing cognitive deficit, or both in an individual in need thereof, comprising administering to the individual a therapeutically effective amount of an isolated agonist antibody that binds to a TREM2 protein. Other aspects of the present disclosure relate to an isolated agonist antibody that binds to a TREM2 protein for use in increasing memory, reducing cognitive deficit, or both in an individual in need thereof. Other aspects of the present disclosure relate to use of an isolated agonist antibody that binds to a TREM2 protein in the manufacture of a medicament for increasing memory, reducing cognitive deficit, or both in an individual in need thereof. In some embodiments, the isolated agonist antibody is the agonist antibody of any of the preceding embodiments.

[0051] Other aspects of the present disclosure relate to a method of increasing motor coordination in an individual in need thereof, comprising administering to the individual a therapeutically effective amount of an isolated agonist antibody that binds to a TREM2 protein. Other aspects of the present disclosure relate to an isolated agonist antibody that binds to a TREM2 protein for use in increasing motor coordination in an individual in need thereof. Other aspects of the present disclosure relate to use of an isolated agonist antibody that binds to a TREM2 protein in the manufacture of a medicament for increasing motor coordination in an individual in need thereof. In some embodiments, the isolated agonist antibody is the agonist antibody of any of the preceding embodiments.

[0052] Other aspects of the present disclosure relate to a method of reducing Abeta peptide levels in an individual in need thereof, comprising administering to the individual a therapeutically effective amount of an isolated agonist antibody that binds to a TREM2 protein. Other aspects of the present disclosure relate to an isolated agonist antibody that binds to a TREM2 protein for use in reducing Abeta peptide levels in an individual in need thereof. Other aspects of the present disclosure relate to use of an isolated agonist antibody that binds to a TREM2 protein in the manufacture of a medicament for reducing Abeta peptide levels an individual in need thereof. In some embodiments, the isolated agonist antibody is the agonist antibody of any of the preceding embodiments.

[0053] Other aspects of the present disclosure relate to a method of increasing the number of CD11b⁺ microglial cells in an individual in need thereof, comprising administering to the individual a therapeutically effective amount of an isolated agonist antibody that binds to a TREM2 protein. Other aspects of the present disclosure relate to an isolated agonist antibody that binds to a TREM2 protein for use in increasing the number of CD11b⁺ microglial cells in an individual in need thereof. Other aspects of the present disclosure relate to use of an isolated agonist antibody that binds to a TREM2 protein in the manufacture of a medicament for increasing the number of CD11b⁺ microglial cells in an individual in need thereof. In some embodiments, the isolated agonist antibody is the agonist antibody of any of the preceding embodiments.

[0054] Other aspects of the present disclosure relate to a method of increasing levels of one or more of FLT1, OPNCSF1, CD11c, and AXL in an individual in need thereof, comprising administering to the individual a therapeutically effective amount of an isolated agonist antibody that binds to a TREM2 protein. Other aspects of the present disclosure relate to an isolated agonist antibody that binds to a TREM2 protein for use in increasing levels of one or more of FLT1, OPNCSF1, CD11c, and AXL in an individual in need thereof. Other aspects of the present disclosure relate to use of an isolated agonist antibody that binds to a TREM2 protein in the manufacture of a medicament for increasing levels of one or more of FLT1, OPNCSF1, CD11c, and AXL in an individual in need thereof. In some embodiments, the isolated agonist antibody is the agonist antibody of any of the preceding embodiments.

[0055] Other aspects of the present disclosure relate to a method of treating spinal cord injury in an individual in need thereof, comprising administering to the individual a therapeutically effective amount of an isolated agonist antibody that binds to a TREM2 protein. Other aspects of the present disclosure relate to an isolated agonist antibody that binds to a TREM2 protein for use in treating spinal cord injury in an individual in need thereof. Other aspects of the present disclosure relate to use of an isolated agonist antibody that binds to a TREM2 protein in the manufacture of a medicament for treating spinal cord injury in an individual in need thereof. In some embodiments, the isolated agonist antibody is the agonist antibody of any of the preceding embodiments.

[0056] Other aspects of the present disclosure relate to a method of treating s chronic colitis or ulcerative colitis in an individual in need thereof, comprising administering to the individual a therapeutically effective amount of an isolated agonist antibody that binds to a TREM2 protein. Other aspects of the present disclosure relate to an isolated agonist antibody that binds to a TREM2 protein for use in treating chronic colitis or ulcerative colitis in an individual in need thereof. Other aspects of the present disclosure relate to use of an isolated agonist antibody that binds to a TREM2 protein in the manufacture of a medicament for treating chronic colitis or ulcerative colitis in an individual in need thereof. In some embodiments, the isolated agonist antibody is the agonist antibody of any of the preceding embodiments.

[0057] In some embodiments that may be combined with any of the preceding embodiments, the antibody does not inhibit the growth of innate immune cells. In some embodiments that may be combined with any of the preceding embodiments, the antibody binds to primary immune cells with a K_{D} of less than 1 nM. In some embodiments that may be combined with any of the preceding embodiments, the K_{D} is determined at a temperature of approximately 4° C. In some embodiments that may be combined with any of the preceding embodiments, the antibody accumulates in the brain, or the cerebrospinal fluid (CSF), or both to an extent that is 1% or more of the concentration of the antibody in the blood. In some embodiments that may be combined with any of the preceding embodiments, the antibody accumulates in the brain, or the cerebrospinal fluid (CSF), or both to an extent that is 2% or more of the concentration of the antibody in the blood. In some embodiments that may be combined with any of the preceding embodiments, the antibody accumulates in the brain, or the cerebrospinal fluid (CSF), or both to an extent that is 3% or more of the concentration of the antibody in the blood. In some embodiments that may be combined with any of the preceding embodiments, the antibody accumulates in the brain, or the cerebrospinal fluid (CSF), or both to an extent that is 4% or more of the concentration of the antibody in the blood.

### BRIEF DESCRIPTION OF THE DRAWINGS

[0058] FIG. 1A shows an amino acid sequence alignment between the human TREM2 protein (SEQ ID NO: 1) and the human NCTR2 protein (SEQ ID NO: 851), depicting the homology between the two proteins. The consensus sequence is SEQ ID NO: 852.

[0059] FIG. 1B shows a structure-based sequence alignment between several TREM proteins and other members of the IgV family. The amino acid residue numbering is consistent with the mature sequence of the human TREM1 protein. The secondary structure elements of TREM1 are illustrated as arrows for the β strands and cylinders for a helices Amino acid residues involved in homo- and heterodimer formation are shown on black background. Cysteine residues that form disulfide bonds and that are conserved for the V-type Ig fold, are depicted in bold and marked with asterisks. Gaps are indicated by “−”. M−1 residues violating antibody-like dimer formation mode are marked with closed triangles as (e.g., Radaev et al., (2003) Structure. 11(12):1527-1535). TREM-1_human (SEQ ID NO: 853), TREM-2_human (SEQ ID NO: 854), TREM-1_mouse (SEQ ID NO: 855), TREM-2_mouse (SEQ ID NO: 856), TREM-3_mouse (SEQ ID NO: 857), NKp44 (SEQ ID NO: 858), aTCR_human (SEQ ID NO: 859), bTCR_human (SEQ ID NO: 860), gTCR_human (SEQ ID NO: 861), dTCR_human (SEQ ID NO: 862), Vd_human (SEQ ID NO: 863), hIGG1_mouse (SEQ ID NO: 864), 1IGG1_mouse (SEQ ID NO: 865), CD8_human (SEQ ID NO: 866), and CTLA4_human (SEQ ID NO: 867).

[0060] FIG. 2 shows an amino acid sequence alignment between the human TREM1 protein (SEQ ID NO: 868) and the human TREM2 protein (SEQ ID NO: 1), depicting the homology between the two proteins. The consensus sequence is SEQ ID NO: 869.

[0061] FIG. 3A shows FACS histograms demonstrating binding of TREM2 antibodies 7E5 and 2H8 to a mouse cell line (BWZ) expressing recombinant mouse TREM2. FIG. 3B shows antibodies 7E5 and 2H8 binding to wild-type (TREM2+/+) bone marrow derived mouse macrophages (BMMac) and TREM2-deficient (TREM2−/−) BMMac. Antibody mIgG1 represents a negative isotype control. Shaded histograms represent the TREM2 negative cells population. Black outlined histograms represent the TREM2 positive cell population. FIG. 3C shows a dose response curve demonstrating dose-dependent binding of the TREM2 antibody 7E5 to BWZ cells expressing recombinant mouse TREM2 but not to parental BWZ cells. Antibody mIgG1 represents the negative isotype control.

[0062] FIG. 4A shows FACS histograms demonstrating binding of TREM2 antibodies 10A9, 10C1, and 8F8 to a human cell line (293) expressing a recombinant human TREM2-DAP12 fusion protein. Shaded histograms represent a TREM2 negative cell population. Black outlined histograms represent a TREM2 positive cell population. FIG. 4B shows antibodies 10A9, 10C1, and 8F8 binding to primary human dendritic cells (hDCs). Shaded histograms show binding of the isotype antibody negative control. Black outlined histograms represent binding of the TREM2 antibodies. FIG. 4C shows a schematic for combining antibody light chain variable region (VL) sequences of humanized versions of anti-TREM2 antibody 9F5 (mAb T2-9F5.1). Additional variations are listed below each sequence. The figure includes sequences for versions of humanized antibody 9F5. In the figure, IGKV2-29*02 (SEQ ID NO: 870); Joining region (SEQ ID NO: 871); T2-9F5.1 (SEQ ID NO: 872); 2-29*02 (SEQ ID NO: 873); h9F5-L1 (SEQ ID NO: 874); h9F5-L2 (SEQ ID NO: 875). FIG. 4D shows a schematic for combining antibody heavy chain variable region (VH) sequences of humanized versions of anti-TREM2 antibody 9F5 (mAb T2-9F5.1). Additional variations are listed below each sequence. The figure includes sequences for versions of humanized antibody 9F5. In the figure, IGHV1-46*01 (SEQ ID NO: 876); Joining region (SEQ ID NO: 877); T2-9F5.1 (SEQ ID NO: 878); 1-46*01 (SEQ ID NO: 879); h9F5-H1 (SEQ ID NO: 880); h9F5-H2 (SEQ ID NO: 881); h9F5-H3 (SEQ ID NO: 882). FIG. 4E shows binding reactivity in percentage to wild-type TREM2 (% WT) of the anti-TREM2 antibody 9F5 (MAb), as well as the anti-TREM2 antibodies T21-9 (Fab), T22 (Fab), and T45-10 (Fab), to the indicated TREM2 mutants.

[0063] FIG. 5A shows Syk phosphorylation as determined by Western blot analysis in mouse bone marrow derived macrophages after incubation with TREM2 antibodies 2F6, 11H5, 2H8, 1H7, 3A7, 3B10, 10A9, 7F8, and 7E5. As a control cells were left untreated (NT) or incubated with mIgG1 isotype control do not induce Syk phosphorylation. FIG. 5B shows Syk phosphorylation as determined by western blot in WT, Fc receptor common gamma chain-deficient (FcgR−/−) and TREM2-deficient (TREM2−/−) bone marrow derived mouse macrophages after incubation with the TREM2 antibodies 7E5, 3A7, and 2F6.

[0064] FIG. 6A shows Syk phosphorylation as determined by Western blot in wild-type (WT) and TREM2-deficient (TREM2−/−) bone marrow derived mouse macrophages that were untreated (NT), or treated with TREM2 antibodies 7E5, 3A7, 8F8, and 2F6 in the presence of a P815 cell line that overexpresses Fc receptors FcR2b and FcR3. Antibody IgG1 is the isotype control. FIG. 6B shows Syk phosphorylation as determined by western blot in WT bone marrow derived mouse macrophages that were untreated (NT), or treated with TREM2 antibodies 7E5, 3A7, 8F8, and 2F6 in the presence of primary murine B cells that express endogenous Fc receptor FcR2b. Antibody IgG1 is the isotype control.

[0065] FIG. 7A shows DAP12 phosphorylation (pTyr) as determined by Western blot in mouse macrophages after incubation with the TREM2 antibodies 11A2, 11H5, 2F6, 3A7, 4G3, 12F9, 3B10, and 7A9, or left untreated (NT). Antibody mIgG1 is the isotype negative control. FIG. 7B shows DAP12 phosphorylation as determined by Western blot in wild-type (WT) and TREM2-deficient (TREM2−/−) mouse macrophages that were untreated (NT), or treated with TREM2 antibodies 7E5 and 2F6. FIG. 7C shows DAP12 phosphorylation as determined by Western blot immunoprecipitation in peritoneal cells from mice that were treated with control antibody MOPC.1 or TREM2 antibody 7E5 for 15 minutes. FIG. 7D shows fold-change over IP-TREM2 of MOPC1-treated mouse for the 15 minute treatment. FIG. 7E shows DAP12 phosphorylation as determined by Western blot immunoprecipitation in peritoneal cells from mice that were treated with control antibody MOPC.1 or TREM2 antibody 7E5 for 24 hours. FIG. 7F shows fold-change over IP-TREM2 of MOPC1-treated mouse for the 24 hour treatment.

[0066] FIG. 8A shows induction of mouse TREM2-dependent luciferase reporter in a cell-based assay. Cells were either untreated (NT) or treated with plate-bound, full-length anti-TREM2 antibodies 1H7, 2F6, 2H8, 3A7, 3B10, 7E5, 7F8, 8F8, and 11H5. Results are expressed as fold over background. The background level is depicted by the dotted line. FIG. 8B shows induction of human TREM2-dependent luciferase reporter in a cell-based assay. Cells were either untreated (NT) or treated with plate-bound, full-length anti-TREM2 antibodies 9F5, 9G1, 9G3, 10A9, 10C1, 11A8, 12D9, 12E2, 12F9, 12G6, 2C7, 2F5, 3C1, and 4D7. Results are expressed as fold over background. Antibody msIgG1 is the isotype negative control. Cells treated with PMA/Ionomycin (P+I) represent the positive control. FIG. 8C shows induction of mouse TREM2-dependent luciferase reporter gene expression by increasing concentrations of plate-bound phosphatidylserine (PS) or sphingomyelin (SM). Results are expressed as absolute luminescence values. FIG. 8D shows induction of human TREM2-dependent luciferase reporter, gene expression by increasing concentrations of plate-bound phosphatidylserine (PS) or sphingomyelin (SM). Results are expressed as absolute luminescence values. FIG. 8E shows induction of human TREM2-dependent luciferase reporter gene expression by increasing concentrations of Apolipoprotein E (APOE). Three different alleles of APOE (APOE2, APOE3 and APOE4) were tested. Results are expressed as absolute luminescence values. FIG. 8F shows binding of APOE2, APOE3 and APOE4 to a recombinant human TREM2 protein as detected by ELISA. Results are expressed as OD₄₅₀.

[0067] FIG. 9A shows induction of mouse TREM2-dependent luciferase reporter in a cell-based assay. Cells were either untreated (NT) or treated with soluble full-length anti-TREM2 antibodies 1H7, 2F6, 2H8, 3A7, 3B10, 7E5, 7F8, 8F8, and 11H5. Antibody mIgG1 is the isotype negative control. Cell treated with PMA/Ionomycin represent the positive control. Results are expressed as fold over background (represented by the dotted line). FIG. 9B shows induction of human TREM2-dependent luciferase reporter expression by full-length anti-TREM2 antibodies 9F5, 9G1, 9G3, 10A9, 10C1, 11A8, 12D9, 12E2, 12F9, 12G6, 2C7, 2F5, 3C1, and 4D7 in solution. Antibody mIgG1 is the isotype negative control. Cells treated with PMA/Ionomycin represent the positive control. Results are expressed as fold over background (represented by the dotted line). FIG. 9C shows a dose dependent induction of the TREM2 luciferase reporter in a cell-based assay. Cells were either untreated (NT) or treated with increasing concentrations of the full-length anti-TREM2 antibody 7E5 in solution. Results are expressed as absolute luminescence values. Data was analyzed with Prism6 software and fitted with log (agonist) vs. response four parameter variable slope. EC50=1.52 nM.

[0068] FIG. 10A shows induction of mouse TREM2-dependent luciferase reporter gene expression by the indicated amounts of full-length anti-TREM2 antibody 7E5 added in solution, and in conjunction with increasing concentrations of plate-bound phosphatidylserine (PS). FIG. 10B shows induction of mouse TREM2-dependent luciferase reporter gene expression by the indicated amounts of full-length IgG1 isotype control antibody added in solution, and in conjunction with increasing concentrations of plate-bound phosphatidylserine (PS). FIG. 10C shows induction of mouse TREM2-dependent luciferase reporter gene expression by the indicated amounts of full-length anti-TREM2 antibody 7E5 added in solution, and in conjunction with increasing concentrations of plate-bound sphingomyelin (SM). FIG. 10D shows induction of mouse TREM2-dependent luciferase reporter gene expression by the indicated amounts of full-length IgG1 isotype control antibody added in solution, and in conjunction with increasing concentrations of plate-bound sphingomyelin (SM). FIG. 10E shows induction of mouse TREM2-dependent luciferase reporter gene expression by full-length anti-TREM2 antibodies 2F6, 3A7, 3B10, 8F8, and 11H5, or the IgG1 isotype control added in solution, and in conjunction with increasing concentrations of plate-bound phosphatidylserine (PS). Results are expressed as absolute luminescence values. FIG. 10F shows induction of mouse TREM2-dependent luciferase reporter gene expression by full-length anti-TREM2 antibody 7E5 in comparison with a commercial antibody added in solution, and in conjunction with increasing concentrations of plate-bound sphingomyelin (SM). Mouse IgG1 and rat IgG2b antibodies were used as isotype controls.

[0069] FIG. 11A shows induction of human TREM2-dependent luciferase reporter gene expression by the indicated amounts of full-length anti-TREM2 antibody 9F5 added in solution, and in conjunction with increasing concentrations of plate-bound phosphatidylserine (PS). FIG. 11B shows induction of human TREM2-dependent luciferase reporter gene expression by the indicated amounts of full-length IgG1 isotype control antibody added in solution, and in conjunction with increasing concentrations of plate-bound phosphatidylserine (PS). FIG. 11C shows induction of human TREM2-dependent luciferase reporter gene expression by full-length anti-TREM2 antibodies 7B3, 9G1, 9G3, 9F5, and IgG1 isotype control antibody (msIgG1) in solution, and in conjunction with increasing concentrations of plate-bound phosphatidylserine (PS). Results are expressed as absolute luminescence values. FIG. 11D shows induction of human TREM2-dependent luciferase reporter gene expression by full-length anti-TREM2 antibodies 11A8, 12F9, 3B10, 8F8, and IgG1 isotype control antibody (msIgG1) in solution, and in conjunction with increasing concentrations of plate-bound phosphatidylserine (PS). Results are expressed as absolute luminescence values. FIG. 11E shows binding of a recombinant human TREM2 protein to APOE3 in the presence of 5 μg/ml of full-length anti-TREM2 antibodies 9F5, 7B3, and 9G3 and in the presence of IgG1 isotype control antibody (msIgG1) in solution. Average and SEM of two replicates are shown. FIG. 11F shows binding of a recombinant human TREM2 protein to APOE3 in the presence of 15 μg/ml of full-length anti-TREM2 antibodies 9F5, 7B3, and 9G3 and in the presence of IgG1 isotype control antibody (msIgG1) in solution. Average and SEM of two replicates are shown.

[0070] FIG. 12A shows the viability of wild-type (WT) bone marrow derived mouse macrophages after incubation with 100 nM soluble full-length anti-TREM2 antibodies 1H7, 2F6, 2H8, 3A7, 7E5, 7F8, and 8F8, or a commercial antibody (R&D Cat#F7E57291). As a negative control cells were incubated with mouse IgG1 and rat IgG2b isotype control antibodies. Results are expressed as % live cells, where 100% is the viability of untreated cells and 0% is the viability of cells cultured in the absence of the cytokine M-CSF. FIG. 12B shows the viability of wild-type (WT) bone marrow derived mouse macrophages after incubation with 2.5 ug/ml or 10 ug/ml of plate-bound full-length anti-TREM2 antibodies 2F6, 3A7, 7E5, and 8F8. As a negative control cells were incubated with mouse IgG1 (mIgG1). Results are expressed as luminescence, which is a measure of cell viability. The dotted line indicates the baseline average viability when cells are left untreated. FIG. 12C shows the number of immune cells expressing the markers CD11b or CD11b and Gr1 that are found in the brain of mice that have been injected with anti-TREM2 antibody 7E5 or an isotype control antibody (mIgG1).

[0071] FIG. 13A shows the design of an exemplary in vivo experiment to determine the effect of TREM2 antibodies injected into the abdominal cavity alone or in combination with LPS on the total number of immune cells. FIG. 13B shows the percentage of neutrophils in the abdominal cavity after injection of LPS, control (CTR) or TREM2 antibody 7E5 alone, or CTR or TREM2 antibody 7E5 in combination with LPS. FIG. 13C shows the number of neutrophil cells in the abdominal cavity after injection of LPS, control (CTR) or TREM2 antibody 7E5 alone, or CTR or TREM2 antibody 7E5 in combination with LPS. FIG. 13D shows the percentage of neutrophils in the abdominal cavity after injection of LPS, control (CTR) or TREM2 antibody 8F8 alone, or CTR or TREM2 antibody 8F8 in combination with LPS. FIG. 13E shows the number of neutrophil cells in the abdominal cavity after injection of LPS, control (CTR) or TREM2 antibody 8F8 alone, or CTR or TREM2 antibody 8F8 in combination with LPS. FIG. 13F shows the percentage of resident macrophages (CD11b⁺F4/80^{high}) in the abdominal cavity after injection of LPS, control (CTR) or TREM2 antibody 7E5 alone, or CTR or TREM2 antibody 7E5 in combination with LPS. FIG. 13G shows the number of resident macrophage cells (CD11b⁺F4/80^{high}) in the abdominal cavity after injection of LPS, control (CTR) or TREM2 antibody 7E5 alone, or CTR or TREM2 antibody 7E5 in combination with LPS. FIG. 13H shows the percentage of resident macrophages (CD11b⁺F4/80^{high}) in the abdominal cavity after injection of LPS, control (CTR) or TREM2 antibody 8F8 alone, or CTR or TREM2 antibody 8F8 in combination with LPS. FIG. 13I shows the number of resident macrophage cells (CD11b⁺F4/80^{high}) in the abdominal cavity after injection of LPS, control (CTR) or TREM2 antibody 8F8 alone, or CTR or TREM2 antibody 8F8 in combination with LPS. FIG. 13J shows the percentage of small infiltrating macrophages (CD11b⁺F4/80^{int}) in the abdominal cavity after injection of LPS, control (CTR) or TREM2 antibody 7E5 alone, or CTR or TREM2 antibody 7E5 in combination with LPS. FIG. 13K shows the number of small infiltrating macrophage cells (CD11b⁺F4/80^{int}) in the abdominal cavity after injection of LPS, control (CTR) or TREM2 antibody 7E5 alone, or CTR or TREM2 antibody 7E5 in combination with LPS. FIG. 13L shows the percentage of small infiltrating macrophages (CD11b⁺F4/80^{int}) in the abdominal cavity after injection of LPS, control (CTR) or TREM2 antibody 8F8 alone, or CTR or TREM2 antibody 8F8 in combination with LPS. FIG. 13M shows the number of small infiltrating macrophage cells (CD11b⁺F4/80^{int}) in the abdominal cavity after injection of LPS, control (CTR) or TREM2 antibody 8F8 alone, or CTR or TREM2 antibody 8F8 in combination with LPS. FIG. 13N shows the design of an exemplary in vivo experiment to determine the effect of TREM2 antibodies injected into the abdominal cavity alone or in combination with LPS on the production of inflammatory mediators CCL4, IL-1β, and MCP-1 (CCL2). FIG. 13O shows the concentration in pg/ml of CCL4 in the abdominal cavity after injection of control (CTR) or TREM2 antibodies 7E5 and 8F8 in combination with LPS. FIG. 13P shows the concentration in pg/ml of IL-1β in the abdominal cavity after injection of control (CTR) or TREM2 antibodies 7E5 and 8F8 in combination with LPS. FIG. 13Q shows the concentration in pg/ml of MCP-1 (CCL2) in the abdominal cavity after injection of control (CTR) or TREM2 antibodies 7E5 and 8F8 in combination with LPS.

[0072] FIG. 14 shows the average concentration (ug/ml) of 7E5 antibody found in blood serum at days 2, 4, 8, and 15 after injection of the indicated doses of antibody in the peritoneum of three mice. Measurement of soluble 7E5 antibody was done by standard ELISA. Data was analyzed with Prism6 software and fitted with exponential one-phase decay curve to calculate the half-life. The half-life of the antibodies is approximately 9.5 days in mouse serum.

[0073] FIG. 15 shows the concentration (ng/ml) of soluble TREM2 receptor (sTREM2) found in blood serum at days 2, 4, 8, and 15 after injection of the indicated doses of antibody in the peritoneum. Measurement of soluble TREM2 was done by ELISA.

[0074] FIG. 16A shows TREM2 receptor down regulation in culture in response to plate-bound phosphatidylserine (PS) and sphingomyelin (SM). FIG. 16 B shows TREM2 receptor down regulation in culture in response to soluble full-length anti-TREM2 antibodies 3A7 and 2F6 in solution, and in conjunction with increasing concentrations of plate-bound phosphatidylserine (PS).

[0075] FIG. 17A shows the change in the expression of pro-inflammatory and anti-inflammatory genes in the hippocampus of APP/PS1 mice that have been injected with anti-TREM2 antibody 7E5 using TaqMan assays containing TaqMan® gene expression probes for IL-1b, IL-6, TNFa, IL-12, YM-1, IL-1Ra, MRC1, IL-10, CD86, FCGR1B, and TGFb (Applied Biosystems, Invitrogen), and real-time PCR as described in Example 16. Fold change is relative to gene expression in control mice (dotted line). Treatment with anti-TREM2 antibody 7E5 significantly increased the expression of IL-1b, IL-6, TNFa, and CD86 by approximately 2-fold. The expression of FCGR1B was increased approximately 3-fold, and the expression of IL-10 was increased approximately 4-fold. By contrast, expression of IL-1Ra decreased by half. Expression of IL-12, YM-1, MRC1, and TGFB remained unchanged. All gene expression data was normalized to 18S rRNA expression. FIG. 17B shows the change in the expression of pro-inflammatory and anti-inflammatory genes in the hippocampus of 5XFAD mice 24 hours and 72 hours after mice were injected intracranially with anti-TREM2 antibody 7E5 using TaqMan assays containing TaqMan® gene expression probes for IL-1b, TNFa, YM-1, IL-1Rn CD86, TGF-β1, CCL2, CCL3, CCL5, CCR2, CXCL10, Gata3 and Rorc (Applied Biosystems, Invitrogen), and real-time PCR as described in Example 16. Fold change is relative to gene expression in mice treated with an isotype control antibody. The dotted line indicates the level of expression in mice treated with control antibody. Treatment with anti-TREM2 antibody 7E5 significantly increased the expression of IL-1b, TNFa, YM-1, CD86, CCL2, CCL3, CCR2, CXCL10, Gata3 and Rorc by approximately 2-fold 72 hours post injection. The expression of CCL5 was increased approximately 3-fold. Expression of IL-1Rn and TGFB instead remained unchanged. All gene expression data was normalized to 18S rRNA expression. *=Pval<0.05; **=Pval<0.01. FIG. 17C shows the change in the expression of FLT1 in the brain of APP/PS1 mice injected intracranially with 5 mg/ml 7E5 or control msIgG1 antibody. *Pval<0.01, Student's t-test. FIG. 17D-17P show expression of cytokines and chemokines in brains of 5XFAD mice 3 months after the mice were injected with 50 mg/kg anti-TREM2 antibody 7E5 weekly using TaqMan assays containing TaqMan® gene expression probes for CCL2, CXCL10, Rorc, TNFa, AXL, LDR, CXCR4, Fabp5, Fabp3, OPN, FLT1, CSF-1, and CD11c, and real-time PCR as described in Example 16. FIG. 17D shows results for CCL2. FIG. 17E shows results for CXCL10. FIG. 17F shows results for Rorc. FIG. 17G shows results for TNFa. FIG. 17H shows results for CSF-1. FIG. 17I shows results for OPN. FIG. 17J shows results for CD11c. FIG. 17K shows results for Flt1. FIG. 17L shows results for AXL. FIG. 17M shows results for LDR. FIG. 17N shows results for CXCR4. FIG. 17O shows results for Fabp5. FIG. 17P shows results for Fabp3. For FIG. 17D-17P *Pval<0.05, **Pval<0.01, ***Pval<0.001, One Way Anova with Tukey post hoc test. FIG. 17Q shows the quantification of Abeta peptide in the frontal cortex (FCX) and hippocampus (HPC) of APP/PS1 mice that were injected intracranially with anti-TREM2 antibody 7E5 or an isotype control antibody (mIgG1) using free-floating immunohistochemistry for Abeta stained with rabbit polyclonal antibody Aβ1-16 (Invitrogen) as described in Example 16. **=Pval<0.01, Two-way ANOVA with Fisher's PLSD post hoc test. FIG. 17R shows the quantification of Abeta peptide in the frontal cortex (FCX) and hippocampus (HPC) of 5XFAD mice that were chronically intraperitoneally injected with anti-TREM2 antibody 7E5 or an isotype control antibody (mIgG1) using free-floating immunohistochemistry for Abeta stained with rabbit polyclonal antibody Aβ1-16 (Invitrogen) as described in Example 16. *=Pval<0.05; **=Pval<0.01. FIG. 17S-17U show results from analysis of insoluble protein from frontal cortex of 5XFAD mice that have been chronically intraperitoneally injected with anti-TREM2 antibody 7E5 or an isotype control antibody (mIgG1) using Meso Scale Discovery Abeta kit that measures Abeta 38 (Ab38), Abeta 40 (Ab40), and Abeta 42 (Ab42). There is a significant decrease in insoluble Abeta42 after treatment with 7E5. FIG. 17S shows results with Abeta 38 (Ab38). FIG. 17T shows results with Abeta 40 (Ab40). FIG. 17U shows results with Abeta 42 (Ab42). FIG. 17V shows the quantification of CD11b expressing cells in the frontal cortex (FCX) and hippocampus (HPC) of APP/PS1 mice that were injected intracranially with anti-TREM2 antibody 7E5 or an isotype control antibody (mIgG1) using free-floating immunohistochemistry for CD11b stained with a rat monoclonal antibody (Serotec, Raleigh, N.C., USA) as described in Example 16. **=Pval<0.01. FIG. 17W shows the quantification of CD11b expressing cells in the frontal cortex (FCX) and hippocampus (HPC) of mice that were injected chronically intraperitoneally with anti-TREM2 antibody 7E5 or an isotype control antibody (mIgG1) using free-floating immunohistochemistry for CD11b stained with a rat monoclonal antibody (Serotec, Raleigh, N.C., USA) as described in Example 16. **=Pval<0.01. FIG. 17X shows cognitive function results assessed with the radial arm water maze test of WT or 5XFAD mice chronically injected with 7E5 or control antibody, as described in Example 16. The radial arm water maze test was performed after 12 weeks of treatment with antibodies. Graphs represent the average number of errors performed to complete the task. Blocks are the average of three trials. 5XFAD transgenic mice receiving the control antibody were significantly impaired compared to the non-transgenic wild-type mice (WT), scoring on average more than 3 errors throughout the second day of testing. By contrast, WT mice treated with either antibody scored less than one error in bocks 8 through 10, as expected from a mouse with normal cognitive function. 5XFAD transgenic mice that are treated with anti-TREM2 antibody 7E5 antibody performed significantly better than the control 5XFAD transgenic mice treated with the isotype antibody, and were indistinguishable from normal nontransgenic mice in blocks 5, 9, and 10, indicating recovery of cognitive functions. Bars indicate SEM, *=Pval<0.05, **=Pval<0.05. FIG. 17Y shows cognitive function results assessed with the novel object recognition test (NORT) of WT or 5xFAD mice chronically injected with 7E5 or control antibody, as described in Example 16. The NORT test was performed after 12 weeks of treatment with antibodies. Bar graphs represent the percentage of time spent at the new object. 5XFAD mice treated with the control antibody spent only ˜50% of the time exploring the novel object, which is indicative of highly unpaired cognitive function. By contrast, mice treated with the anti-TREM2 antibody 7E5 spent 67% of the time exploring the novel object, which is close to normal cognitive function, indicating almost full recovery. Post hoc Fisher's PLSD test was used for statistical analysis **=Pval<0.01.

[0076] FIG. 18 shows TREM2 expression on the indicated immune cell populations present in the spleen (SPL) or in the tumor (Tum) of naïve mice or mice bearing the indicated types of tumors.

[0077] FIG. 19A shows the tumor size in wild-type (WT) or TREM2-deficient (KO) mice, measured at day 8 or day 26 after inoculation with MC38 tumor cells. Each dot indicates an individual mouse. The mean and standard error (SEM) are indicated. Mann-Whitney U test was used for statistical analysis. FIG. 19B shows the median growth curve of MC38 cells implanted in wild-type (WT) or TREM2-deficient (TREM2 KO) mice.

[0078] FIG. 20 shows a dose dependent improvement in cognitive function in mice with traumatic brain injury that were treated with different doses of anti-TREM2 antibody 7E5. Cognitive function was assessed with the novel object recognition test (NORT), as described in Example 25. Treatment groups are: 1=40 mg/Kg 7E5; 2=20 mg/Kg 7E5; 3=10 mg/Kg 7E5; 4=5 mg/Kg 7E5 and CTR=40 mg/Kg isotype control antibody mIgG1. The NORT test was performed at day 32 after injury. Bar graphs represent the percentage of time spent at the new object from total exploration time spending of the two objects. “Baseline” bar graphs represent the time spent exploring two identical objects, which is similar regardless of the treatment that the mice have received. “Test” bar graphs represent the time spent exploring a new object. Mice with traumatic brain injury that are treated with the control antibody spent only 57.4±5.3% exploring the novel object, which is indicative of highly unpaired cognitive function. By contrast, mice that are treated with the highest dose of anti-TREM2 antibody 7E5 spent 73.9±5.4% of the time exploring the novel object, which is close to normal cognitive function, indicating almost full recovery. Post hoc Fisher's PLSD test was used for statistical analysis *=Pval<0.05.

[0079] FIG. 21A shows the amount of the cytokine TNFa measured in the peritoneal cavity of TREM2 wild-type mice (WT) and TREM2 knock-out mice (KO) that were injected with Brewer's Thioglyicollate and then administered anti-TREM2 antibody 7E5 or isotype control antibody (mIgG1). The concentration of TNFa increased about 6-fold in mice treated with antibody 7E5, as compared to control treated mice. FIG. 21B shows the amount of the cytokine CCL2 measured in the peritoneal cavity of TREM2 wild-type mice (WT) and TREM2 knock-out mice (KO) that were injected with Brewer's Thioglyicollate and then administered anti-TREM2 antibody 7E5 or isotype control antibody (mIgG1). The concentration of CCL2 increased of −2-fold in mice treated with antibody 7E5, as compared to control treated mice. The increase of these cytokines is specific because it does not occur in the TREM2 KO mice.

[0080] FIGS. 22A and 22B show results of Basso Mouse Scale (BMS) test to measure hindlimb performance in mice treated with anti-TREM2 antibody 7E5 (7E5) or isotype control antibody (Control IgG) after induction of spinal cord injury on day 0. FIG. 22A shows BMS scores. FIG. 22B shows BMS subscores. The results indicate that antibody 7E5 causes transient improvement in motor function after spinal cord contusion as measured by the BMS scoring system. *p<0.05, 2-way repeated ANOVA with Tukey post hoc test.

[0081] FIG. 23 shows percent (%) survival of human monocyte-derived dendritic cells after incubation with soluble TREM2 antibody 9F5 or 10A9. In contrast to antibody 10A9, there is no significant decrease in survival of dendritic cells upon incubation with antibody 9F5. “mIgG1” refers to a mouse istotype control antibody, and “Media” refers to a culture media-only control.

[0082] FIG. 24 shows that treatment of chronically dextran sodium sulfate (DSS)-challenged mice with the anti-TREM2 antibody 7E5 significantly reduces symptoms of chronic colitis. FIG. 24A shows body weight loss of chronically DSS-challenged mice treated with antibody 7E5. FIG. 24B shows disease activity index of chronically DSS-challenged mice treated with antibody 7E5. FIG. 24C shows colon length of chronically DSS-challenged mice treated with antibody 7E5. FIG. 24D shows colon endoscopic score of chronically DSS-challenged mice treated with antibody 7E5. Statistical analysis was performed using two-way ANOVA (FIGS. 24A and 24B) or unpaired t-test (FIGS. 24C and 24D), ***p<0.001, ****p<0.0001.

[0083] FIG. 25 shows that the anti-TREM2 antibody 9F5 can bind to and cross-link human TREM2 expressed by mouse macrophages. FIG. 25A shows FACS histograms demonstrating binding of human specific TREM2 antibodies 9F5 and 10A9 to human TREM2 expressed on macrophages from humanized TEM2 BAC transgenic mice (huTREM2 Tg), but not on macrophages from wild-type mice (WT). Anti-TREM2 antibodies that bind to both human and mouse TREM2 (antibody 2F5 and a commercial antibody from R&D) show positive binding to TREM2 expressed on macrophages from both from WT and huTREM2 Tg mice. Grey shaded plots are isotype stained cells, and black lined histograms show cells stained with anti-TREM2 antibodies. FIG. 25B shows secretion of TNFa by macrophages from humanized TEM2 BAC transgenic mice (Bac-Tg) that were stimulated in vitro with plate bound 9F5 or control antibody. FIG. 25C shows Dap12 phosphorylation (pTyr) after in vitro clustering of anti-TREM2 antibody 9F5 on macrophages from humanized TEM2 BAC transgenic mice (Bac-Tg) or wild-type mice (WT). The control Iantibody did not induce Dap12 phosphorylation.

[0084] FIG. 26A shows levels of soluble human Trem2 (sTREM2) measured in human TREM2 BAC transgenic mice (huTREM2 Tg) compared to wild-type mice (WT). Anti-TREM2 antibody T21-9 significantly increases plasma levels of sTREM2, while anti-TREM2 antibody 9F5 does not. FIG. 26B shows that anti-TREM2 antibody 9F5 binds only very weakly to sTREM2 in plasma samples, in contrast to anti-TREM2 antibody T21-9. The X axis denotes the dilution factor of the plasma tested and the Y axis shows the optical density readout.

### DETAILED DESCRIPTION OF THE PRESENT DISCLOSURE

### General Techniques

[0085] The techniques and procedures described or referenced herein are generally well understood and commonly employed using conventional methodology by those skilled in the art, such as, for example, the widely utilized methodologies described in Sambrook et al., Molecular Cloning: A Laboratory Manual 3d edition (2001) Cold Spring Harbor Laboratory Press, Cold Spring Harbor, N.Y.; Current Protocols in Molecular Biology (F. M. Ausubel, et al. eds., (2003)); the series Methods in Enzymology (Academic Press, Inc.): PCR 2: A Practical Approach (M. J. MacPherson, B. D. Hames and G. R. Taylor eds. (1995)), Harlow and Lane, eds. (1988) Antibodies, A Laboratory Manual, and Animal Cell Culture (R. I. Freshney, ed. (1987)); Oligonucleotide Synthesis (M. J. Gait, ed., 1984); Methods in Molecular Biology, Humana Press; Cell Biology: A Laboratory Notebook (J. E. Cellis, ed., 1998) Academic Press; Animal Cell Culture (R. I. Freshney), ed., 1987); Introduction to Cell and Tissue Culture (J. P. Mather and P. E. Roberts, 1998) Plenum Press; Cell and Tissue Culture: Laboratory Procedures (A. Doyle, J. B. Griffiths, and D. G. Newell, eds., 1993-8) J. Wiley and Sons; Handbook of Experimental Immunology (D. M. Weir and C. C. Blackwell, eds.); Gene Transfer Vectors for Mammalian Cells (J. M. Miller and M. P. Calos, eds., 1987); PCR: The Polymerase Chain Reaction, (Mullis et al., eds., 1994); Current Protocols in Immunology (J. E. Coligan et al., eds., 1991); Short Protocols in Molecular Biology (Wiley and Sons, 1999); Immunobiology (C. A. Janeway and P. Travers, 1997); Antibodies (P. Finch, 1997); Antibodies: A Practical Approach (D. Catty., ed., IRL Press, 1988-1989); Monoclonal Antibodies: A Practical Approach (P. Shepherd and C. Dean, eds., Oxford University Press, 2000); Using Antibodies: A Laboratory Manual (E. Harlow and D. Lane (Cold Spring Harbor Laboratory Press, 1999); The Antibodies (M. Zanetti and J. D. Capra, eds., Harwood Academic Publishers, 1995); and Cancer: Principles and Practice of Oncology (V. T. DeVita et al., eds., J. B. Lippincott Company, 1993).

### Definitions

[0086] As used herein, the term “preventing” includes providing prophylaxis with respect to occurrence or recurrence of a particular disease, disorder, or condition in an individual. An individual may be predisposed to, susceptible to a particular disease, disorder, or condition, or at risk of developing such a disease, disorder, or condition, but has not yet been diagnosed with the disease, disorder, or condition.

[0087] As used herein, an individual “at risk” of developing a particular disease, disorder, or condition may or may not have detectable disease or symptoms of disease, and may or may not have displayed detectable disease or symptoms of disease prior to the treatment methods described herein. “At risk” denotes that an individual has one or more risk factors, which are measurable parameters that correlate with development of a particular disease, disorder, or condition, as known in the art. An individual having one or more of these risk factors has a higher probability of developing a particular disease, disorder, or condition than an individual without one or more of these risk factors.

[0088] As used herein, the term “treatment” refers to clinical intervention designed to alter the natural course of the individual being treated during the course of clinical pathology. Desirable effects of treatment include decreasing the rate of progression, ameliorating or palliating the pathological state, and remission or improved prognosis of a particular disease, disorder, or condition. An individual is successfully “treated”, for example, if one or more symptoms associated with a particular disease, disorder, or condition are mitigated or eliminated.

[0089] An “effective amount” refers to at least an amount effective, at dosages and for periods of time necessary, to achieve the desired therapeutic or prophylactic result. An effective amount can be provided in one or more administrations. An effective amount herein may vary according to factors such as the disease state, age, sex, and weight of the individual, and the ability of the treatment to elicit a desired response in the individual. An effective amount is also one in which any toxic or detrimental effects of the treatment are outweighed by the therapeutically beneficial effects. For prophylactic use, beneficial or desired results include results such as eliminating or reducing the risk, lessening the severity, or delaying the onset of the disease, including biochemical, histological and/or behavioral symptoms of the disease, its complications and intermediate pathological phenotypes presenting during development of the disease. For therapeutic use, beneficial or desired results include clinical results such as decreasing one or more symptoms resulting from the disease, increasing the quality of life of those suffering from the disease, decreasing the dose of other medications required to treat the disease, enhancing effect of another medication such as via targeting, delaying the progression of the disease, and/or prolonging survival. An effective amount of drug, compound, or pharmaceutical composition is an amount sufficient to accomplish prophylactic or therapeutic treatment either directly or indirectly. As is understood in the clinical context, an effective amount of a drug, compound, or pharmaceutical composition may or may not be achieved in conjunction with another drug, compound, or pharmaceutical composition. Thus, an “effective amount” may be considered in the context of administering one or more therapeutic agents, and a single agent may be considered to be given in an effective amount if, in conjunction with one or more other agents, a desirable result may be or is achieved.

[0090] A “therapeutically effective amount” is at least the minimum concentration required to effect a measurable improvement of a particular disease, disorder, or condition. A therapeutically effective amount herein may vary according to factors such as the disease state, age, sex, and weight of the patient, and the ability of the anti-TREM2 antibody to elicit a desired response in the individual. A therapeutically effective amount is also one in which any toxic or detrimental effects of the anti-TREM2 antibody are outweighed by the therapeutically beneficial effects.

[0091] As used herein, administration “in conjunction” with another compound or composition includes simultaneous administration and/or administration at different times. Administration in conjunction also encompasses administration as a co-formulation or administration as separate compositions, including at different dosing frequencies or intervals, and using the same route of administration or different routes of administration.

[0092] The term “immunoglobulin” (Ig) is used interchangeably with “antibody” herein. The term “antibody” herein is used in the broadest sense and specifically covers monoclonal antibodies, polyclonal antibodies, multispecific antibodies (e.g., bispecific antibodies) formed from at least two intact antibodies, and antibody fragments so long as they exhibit the desired biological activity.

[0093] The basic 4-chain antibody unit is a heterotetrameric glycoprotein composed of two identical light (L) chains and two identical heavy (H) chains. The pairing of a V_{H} and V_{L} together forms a single antigen-binding site. For the structure and properties of the different classes of antibodies, see, e.g., Basic and Clinical Immunology, 8th Ed., Daniel P. Stites, Abba I. Ten and Tristram G. Parslow (eds.), Appleton & Lange, Norwalk, Conn., 1994, page 71 and Chapter 6.

[0094] The L chain from any vertebrate species can be assigned to one of two clearly distinct types, called kappa (“κ”) and lambda (“λ”), based on the amino acid sequences of their constant domains. Depending on the amino acid sequence of the constant domain of their heavy chains (CH), immunoglobulins can be assigned to different classes or isotypes. There are five classes of immunoglobulins: IgA, IgD, IgE, IgG, and IgM, having heavy chains designated alpha (“α”), delta (“δ”), epsilon (“ε”), gamma (“γ”) and mu (“μ”), respectively. The γ and α classes are further divided into subclasses (isotypes) on the basis of relatively minor differences in the CH sequence and function, e.g., humans express the following subclasses: IgG1, IgG2, IgG3, IgG4, IgA1, and IgA2. The subunit structures and three dimensional configurations of different classes of immunoglobulins are well known and described generally in, for example, Abbas et al., Cellular and Molecular Immunology, 4^{th} ed. (W.B. Saunders Co., 2000).

[0095] “Native antibodies” are usually heterotetrameric glycoproteins of about 150,000 daltons, composed of two identical light (L) chains and two identical heavy (H) chains. Each light chain is linked to a heavy chain by one covalent disulfide bond, while the number of disulfide linkages varies among the heavy chains of different immunoglobulin isotypes. Each heavy and light chain also has regularly spaced intra-chain disulfide bridges. Each heavy chain has at one end a variable domain (V_{H}) followed by a number of constant domains. Each light chain has a variable domain at one end (V_{L}) and a constant domain at its other end; the constant domain of the light chain is aligned with the first constant domain of the heavy chain, and the light chain variable domain is aligned with the variable domain of the heavy chain. Particular amino acid residues are believed to form an interface between the light chain and heavy chain variable domains.

[0096] An “isolated” antibody, such as an isolated anti-TREM2 antibody of the present disclosure, is one that has been identified, separated and/or recovered from a component of its production environment (e.g., naturally or recombinantly). Preferably, the isolated polypeptide is free of association with all other contaminant components from its production environment. Contaminant components from its production environment, such as those resulting from recombinant transfected cells, are materials that would typically interfere with research, diagnostic or therapeutic uses for the antibody, and may include enzymes, hormones, and other proteinaceous or non-proteinaceous solutes. In preferred embodiments, the polypeptide will be purified: (1) to greater than 95% by weight of antibody as determined by, for example, the Lowry method, and in some embodiments, to greater than 99% by weight; (2) to a degree sufficient to obtain at least 15 residues of N-terminal or internal amino acid sequence by use of a spinning cup sequenator, or (3) to homogeneity by SDS-PAGE under non-reducing or reducing conditions using Coomassie blue or, preferably, silver stain. Isolated antibody includes the antibody in situ within recombinant T-cells since at least one component of the antibody's natural environment will not be present. Ordinarily, however, an isolated polypeptide or antibody will be prepared by at least one purification step.

[0097] The “variable region” or “variable domain” of an antibody, such as an anti-TREM2 antibody of the present disclosure, refers to the amino-terminal domains of the heavy or light chain of the antibody. The variable domains of the heavy chain and light chain may be referred to as “V_{H}” and “V_{L}”, respectively. These domains are generally the most variable parts of the antibody (relative to other antibodies of the same class) and contain the antigen binding sites.

[0098] The term “variable” refers to the fact that certain segments of the variable domains differ extensively in sequence among antibodies, such as anti-TREM2 antibodies of the present disclosure. The V domain mediates antigen binding and defines the specificity of a particular antibody for its particular antigen. However, the variability is not evenly distributed across the entire span of the variable domains. Instead, it is concentrated in three segments called hypervariable regions (HVRs) both in the light-chain and the heavy chain variable domains. The more highly conserved portions of variable domains are called the framework regions (FR). The variable domains of native heavy and light chains each comprise four FR regions, largely adopting a beta-sheet configuration, connected by three HVRs, which form loops connecting, and in some cases forming part of, the beta-sheet structure. The HVRs in each chain are held together in close proximity by the FR regions and, with the HVRs from the other chain, contribute to the formation of the antigen-binding site of antibodies (see Kabat et al., Sequences of Immunological Interest, Fifth Edition, National Institute of Health, Bethesda, Md. (1991)). The constant domains are not involved directly in the binding of antibody to an antigen, but exhibit various effector functions, such as participation of the antibody in antibody-dependent-cellular toxicity.

[0099] The term “monoclonal antibody” as used herein refers to an antibody, such as a monoclonal anti-TREM2 antibody of the present disclosure, obtained from a population of substantially homogeneous antibodies, i.e., the individual antibodies comprising the population are identical except for possible naturally occurring mutations and/or post-translation modifications (e.g., isomerizations, amidations, etc.) that may be present in minor amounts. Monoclonal antibodies are highly specific, being directed against a single antigenic site. In contrast to polyclonal antibody preparations which typically include different antibodies directed against different determinants (epitopes), each monoclonal antibody is directed against a single determinant on the antigen. In addition to their specificity, the monoclonal antibodies are advantageous in that they are synthesized by the hybridoma culture, uncontaminated by other immunoglobulins. The modifier “monoclonal” indicates the character of the antibody as being obtained from a substantially homogeneous population of antibodies, and is not to be construed as requiring production of the antibody by any particular method. For example, the monoclonal antibodies to be used in accordance with the present invention may be made by a variety of techniques, including, for example, the hybridoma method (e.g., Kohler and Milstein., Nature, 256:495-97 (1975); Hongo et al., Hybridoma, 14 (3):253-260 (1995), Harlow et al., Antibodies: A Laboratory Manual, (Cold Spring Harbor Laboratory Press, 2d ed. 1988); Hammerling et al., in: Monoclonal Antibodies and T-Cell Hybridomas 563-681 (Elsevier, N.Y., 1981)), recombinant DNA methods (see, e.g., U.S. Pat. No. 4,816,567), phage-display technologies (see, e.g., Clackson et al., Nature, 352:624-628 (1991); Marks et al., J. Mol. Biol. 222:581-597 (1992); Sidhu et al., J. Mol. Biol. 338(2): 299-310 (2004); Lee et al., J. Mol. Biol. 340(5):1073-1093 (2004); Fellouse, Proc. Nat'l Acad. Sci. USA 101(34):12467-472 (2004); and Lee et al., J. Immunol. Methods 284(1-2):119-132 (2004), and technologies for producing human or human-like antibodies in animals that have parts or all of the human immunoglobulin loci or genes encoding human immunoglobulin sequences (see, e.g., WO 1998/24893; WO 1996/34096; WO 1996/33735; WO 1991/10741; Jakobovits et al., Proc. Nat'l Acad. Sci. USA 90:2551 (1993); Jakobovits et al., Nature 362:255-258 (1993); Bruggemann et al., Year in Immunol. 7:33 (1993); U.S. Pat. Nos. 5,545,807; 5,545,806; 5,569,825; 5,625,126; 5,633,425; and U.S. Pat. No. 5,661,016; Marks et al., Bio/Technology 10:779-783 (1992); Lonberg et al., Nature 368:856-859 (1994); Morrison, Nature 368:812-813 (1994); Fishwild et al., Nature Biotechnol. 14:845-851 (1996); Neuberger, Nature Biotechnol. 14:826 (1996); and Lonberg and Huszar, Intern. Rev. Immunol. 13:65-93 (1995).

[0100] The terms “full-length antibody,” “intact antibody” or “whole antibody” are used interchangeably to refer to an antibody, such as an anti-TREM2 antibody of the present disclosure, in its substantially intact form, as opposed to an antibody fragment. Specifically whole antibodies include those with heavy and light chains including an Fc region. The constant domains may be native sequence constant domains (e.g., human native sequence constant domains) or amino acid sequence variants thereof. In some cases, the intact antibody may have one or more effector functions.

[0101] An “antibody fragment” comprises a portion of an intact antibody, preferably the antigen binding and/or the variable region of the intact antibody. Examples of antibody fragments include Fab, Fab′, F(ab′)₂ and Fv fragments; diabodies; linear antibodies (see U.S. Pat. No. 5,641,870, Example 2; Zapata et al., Protein Eng. 8(10):1057-1062 (1995)); single-chain antibody molecules and multispecific antibodies formed from antibody fragments.

[0102] Papain digestion of antibodies, such as anti-TREM2 antibodies of the present disclosure, produces two identical antigen-binding fragments, called “Fab” fragments, and a residual “Fe” fragment, a designation reflecting the ability to crystallize readily. The Fab fragment consists of an entire L chain along with the variable region domain of the H chain (V_{H}), and the first constant domain of one heavy chain (C_{H}1). Each Fab fragment is monovalent with respect to antigen binding, i.e., it has a single antigen-binding site. Pepsin treatment of an antibody yields a single large F(ab′)₂ fragment which roughly corresponds to two disulfide linked Fab fragments having different antigen-binding activity and is still capable of cross-linking antigen. Fab′ fragments differ from Fab fragments by having a few additional residues at the carboxy terminus of the C_{H}1 domain including one or more cysteines from the antibody hinge region. Fab′-SH is the designation herein for Fab′ in which the cysteine residue(s) of the constant domains bear a free thiol group. F(ab′)₂ antibody fragments originally were produced as pairs of Fab′ fragments which have hinge cysteines between them. Other chemical couplings of antibody fragments are also known.

[0103] The Fc fragment comprises the carboxy-terminal portions of both H chains held together by disulfides. The effector functions of antibodies are determined by sequences in the Fc region, the region which is also recognized by Fc receptors (FcR) found on certain types of cells.

[0104] “Fv” is the minimum antibody fragment which contains a complete antigen-recognition and -binding site. This fragment consists of a dimer of one heavy- and one light-chain variable region domain in tight, non-covalent association. From the folding of these two domains emanate six hypervariable loops (3 loops each from the H and L chain) that contribute the amino acid residues for antigen binding and confer antigen binding specificity to the antibody. However, even a single variable domain (or half of an Fv comprising only three HVRs specific for an antigen) has the ability to recognize and bind antigen, although at a lower affinity than the entire binding site.

[0105] “Single-chain Fv” also abbreviated as “sFv” or “scFv” are antibody fragments that comprise the VH and VL antibody domains connected into a single polypeptide chain. Preferably, the sFv polypeptide further comprises a polypeptide linker between the V_{H} and V_{L} domains, which enables the sFv to form the desired structure for antigen binding. For a review of the sFv, see Plückthun in The Pharmacology of Monoclonal Antibodies, vol. 113, Rosenburg and Moore eds., Springer-VerLAG-3, New York, pp. 269-315 (1994).

[0106] “Functional fragments” of antibodies, such as anti-TREM2 antibodies of the present disclosure, comprise a portion of an intact antibody, generally including the antigen binding or variable region of the intact antibody or the F region of an antibody which retains or has modified FcR binding capability. Examples of antibody fragments include linear antibody, single-chain antibody molecules and multispecific antibodies formed from antibody fragments.

[0107] The term “diabodies” refers to small antibody fragments prepared by constructing sFv fragments (see preceding paragraph) with short linkers (about 5-10) residues) between the V_{H} and V_{L} domains such that inter-chain but not intra-chain pairing of the V domains is achieved, thereby resulting in a bivalent fragment, i.e., a fragment having two antigen-binding sites. Bispecific diabodies are heterodimers of two “crossover” sFv fragments in which the V_{H} and V_{L} domains of the two antibodies are present on different polypeptide chains. Diabodies are described in greater detail in, for example, EP 404,097; WO 93/11161; Hollinger et al., Proc. Nat'l Acad. Sci. USA 90:6444-48 (1993).

[0108] As used herein, a “chimeric antibody” refers to an antibody (immunoglobulin), such as a chimeric anti-TREM2 antibody of the present disclosure, in which a portion of the heavy and/or light chain is identical with or homologous to corresponding sequences in antibodies derived from a particular species or belonging to a particular antibody class or subclass, while the remainder of the chain(s) is(are) identical with or homologous to corresponding sequences in antibodies derived from another species or belonging to another antibody class or subclass, as well as fragments of such antibodies, so long as they exhibit the desired biological activity (U.S. Pat. No. 4,816,567; Morrison et al., Proc. Nat'l Acad. Sci. USA, 81:6851-55 (1984)). Chimeric antibodies of interest herein include PRIMATIZED® antibodies wherein the antigen-binding region of the antibody is derived from an antibody produced by, e.g., immunizing macaque monkeys with an antigen of interest. As used herein, “humanized antibody” is used a subset of “chimeric antibodies.”

[0109] “Humanized” forms of non-human (e.g., murine) antibodies, such as humanized forms of anti-TREM2 antibodies of the present disclosure, are chimeric antibodies that contain minimal sequence derived from non-human immunoglobulin. In one embodiment, a humanized antibody is a human immunoglobulin (recipient antibody) in which residues from an HVR of the recipient are replaced by residues from an HVR of a non-human species (donor antibody) such as mouse, rat, rabbit or non-human primate having the desired specificity, affinity, and/or capacity. In some instances, FR residues of the human immunoglobulin are replaced by corresponding non-human residues. Furthermore, humanized antibodies may comprise residues that are not found in the recipient antibody or in the donor antibody. These modifications may be made to further refine antibody performance, such as binding affinity. In general, a humanized antibody will comprise substantially all of at least one, and typically two, variable domains, in which all or substantially all of the hypervariable loops correspond to those of a non-human immunoglobulin sequence, and all or substantially all of the FR regions are those of a human immunoglobulin sequence, although the FR regions may include one or more individual FR residue substitutions that improve antibody performance, such as binding affinity, isomerization, immunogenicity, and the like. The number of these amino acid substitutions in the FR is typically no more than 6 in the H chain, and in the L chain, no more than 3. The humanized antibody optionally will also comprise at least a portion of an immunoglobulin constant region (Fc), typically that of a human immunoglobulin. For further details, see, e.g., Jones et al., Nature 321:522-525 (1986); Riechmann et al., Nature 332:323-329 (1988); and Presta, Curr. Op. Struct. Biol. 2:593-596 (1992). See also, for example, Vaswani and Hamilton, Ann. Allergy, Asthma & Immunol. 1:105-115 (1998); Harris, Biochem. Soc. Transactions 23:1035-1038 (1995); Hurle and Gross, Curr. Op. Biotech. 5:428-433 (1994); and U.S. Pat. Nos. 6,982,321 and 7,087,409.

[0110] A “human antibody” is one that possesses an amino-acid sequence corresponding to that of an antibody, such as an anti-TREM2 antibody of the present disclosure, produced by a human and/or has been made using any of the techniques for making human antibodies as disclosed herein. This definition of a human antibody specifically excludes a humanized antibody comprising non-human antigen-binding residues. Human antibodies can be produced using various techniques known in the art, including phage-display libraries. Hoogenboom and Winter, J. Mol. Biol., 227:381 (1991); Marks et al., J. Mol. Biol., 222:581 (1991). Also available for the preparation of human monoclonal antibodies are methods described in Cole et al., Monoclonal Antibodies and Cancer Therapy, Alan R. Liss, p. 77 (1985); Boerner et al., J. Immunol., 147(1):86-95 (1991). See also van Dijk and van de Winkel, Curr. Opin. Pharmacol. 5:368-74 (2001). Human antibodies can be prepared by administering the antigen to a transgenic animal that has been modified to produce such antibodies in response to antigenic challenge, but whose endogenous loci have been disabled, e g, immunized xenomice (see, e.g., U.S. Pat. Nos. 6,075,181 and 6,150,584 regarding XENOMOUSE™ technology). See also, for example, Li et al., Proc. Nat'l Acad. Sci. USA, 103:3557-3562 (2006) regarding human antibodies generated via a human B-cell hybridoma technology.

[0111] The term “hypervariable region,” “HVR,” or “HV,” when used herein refers to the regions of an antibody-variable domain, such as that of an anti-TREM2 antibody of the present disclosure, that are hypervariable in sequence and/or form structurally defined loops. Generally, antibodies comprise six HVRs; three in the VH (H1, H2, H3), and three in the VL (L1, L2, L3). In native antibodies, H3 and L3 display the most diversity of the six HVRs, and H3 in particular is believed to play a unique role in conferring fine specificity to antibodies. See, e.g., Xu et al., Immunity 13:37-45 (2000); Johnson and Wu in Methods in Molecular Biology 248:1-25 (Lo, ed., Human Press, Totowa, N.J., 2003)). Indeed, naturally occurring camelid antibodies consisting of a heavy chain only are functional and stable in the absence of light chain. See, e.g., Hamers-Casterman et al., Nature 363:446-448 (1993) and Sheriff et al., Nature Struct. Biol. 3:733-736 (1996).

[0112] A number of HVR delineations are in use and are encompassed herein. The HVRs that are Kabat complementarity-determining regions (CDRs) are based on sequence variability and are the most commonly used (Kabat et al., supra). Chothia refers instead to the location of the structural loops (Chothia and Lesk J. Mol. Biol. 196:901-917 (1987)). The AbM HVRs represent a compromise between the Kabat CDRs and Chothia structural loops, and are used by Oxford Molecular's AbM antibody-modeling software. The “contact” HVRs are based on an analysis of the available complex crystal structures. The residues from each of these HVRs are noted below.

| Loop | Kabat | AbM | Chothia | Contact |
|---|---|---|---|---|
| L1 | L24-L34 | L24-L34 | L26-L32 | L30-L36 |
| L2 | L50-L56 | L50-L56 | L50-L52 | L46-L55 |
| L3 | L89-L97 | L89-L97 | L91-L96 | L89-L96 |
| H1 | H31-H35B | H26-H35B | H26-H32 | H30-H35B |
| | | | | (Kabat numbering) |
| H1 | H31-H35 | H26-H35 | H26-H32 | H30-H35 |
| | | | | (Chothia numbering) |
| H2 | H50-H65 | H50-H58 | H53-H55 | H47-H58 |
| H3 | H95-H102 | H95-H102 | H96-H101 | H93-H101 |

[0113] HVRs may comprise “extended HVRs” as follows: 24-36 or 24-34 (L1), 46-56 or 50-56 (L2), and 89-97 or 89-96 (L3) in the VL, and 26-35 (H1), 50-65 or 49-65 (a preferred embodiment) (H2), and 93-102, 94-102, or 95-102 (H3) in the VH. The variable-domain residues are numbered according to Kabat et al., supra, for each of these extended-HVR definitions.

[0114] “Framework” or “FR” residues are those variable-domain residues other than the HVR residues as herein defined.

[0115] The phrase “variable-domain residue-numbering as in Kabat” or “amino-acid-position numbering as in Kabat,” and variations thereof, refers to the numbering system used for heavy-chain variable domains or light-chain variable domains of the compilation of antibodies in Kabat et al., supra. Using this numbering system, the actual linear amino acid sequence may contain fewer or additional amino acids corresponding to a shortening of, or insertion into, a FR or HVR of the variable domain. For example, a heavy-chain variable domain may include a single amino acid insert (residue 52a according to Kabat) after residue 52 of H2 and inserted residues (e.g., residues 82a, 82b, and 82c, etc. according to Kabat) after heavy-chain FR residue 82. The Kabat numbering of residues may be determined for a given antibody by alignment at regions of homology of the sequence of the antibody with a “standard” Kabat numbered sequence.

[0116] The Kabat numbering system is generally used when referring to a residue in the variable domain (approximately residues 1-107 of the light chain and residues 1-113 of the heavy chain) (e.g., Kabat et al., Sequences of Immunological Interest. 5th Ed. Public Health Service, National Institutes of Health, Bethesda, Md. (1991)). The “EU or, Kabat numbering system” or “EU index” is generally used when referring to a residue in an immunoglobulin heavy chain constant region (e.g., the EU index reported in Kabat et al., supra). The “EU index as in Kabat” refers to the residue numbering of the human IgG1 EU antibody. References to residue numbers in the variable domain of antibodies means residue numbering by the Kabat numbering system. References to residue numbers in the constant domain of antibodies means residue numbering by the EU or, Kabat numbering system (e.g., see United States Patent Publication No. 2010-280227).

[0117] An “acceptor human framework” as used herein is a framework comprising the amino acid sequence of a VL or VH framework derived from a human immunoglobulin framework or a human consensus framework. An acceptor human framework “derived from” a human immunoglobulin framework or a human consensus framework may comprise the same amino acid sequence thereof, or it may contain pre-existing amino acid sequence changes. In some embodiments, the number of pre-existing amino acid changes are 10 or less, 9 or less, 8 or less, 7 or less, 6 or less, 5 or less, 4 or less, 3 or less, or 2 or less. Where pre-existing amino acid changes are present in a VH, preferable those changes occur at only three, two, or one of positions 71H, 73H and 78H; for instance, the amino acid residues at those positions may by 71A, 73T and/or 78A. In one embodiment, the VL acceptor human framework is identical in sequence to the VL human immunoglobulin framework sequence or human consensus framework sequence.

[0118] A “human consensus framework” is a framework that represents the most commonly occurring amino acid residues in a selection of human immunoglobulin VL or VH framework sequences. Generally, the selection of human immunoglobulin VL or VH sequences is from a subgroup of variable domain sequences. Generally, the subgroup of sequences is a subgroup as in Kabat et al., Sequences of Proteins of Immunological Interest, 5th Ed. Public Health Service, National Institutes of Health, Bethesda, Md. (1991). Examples include for the VL, the subgroup may be subgroup kappa I, kappa II, kappa III or kappa IV as in Kabat et al., supra. Additionally, for the VH, the subgroup may be subgroup I, subgroup II, or subgroup III as in Kabat et al., supra.

[0119] An “amino-acid modification” at a specified position, e.g., of an anti-TREM2 antibody of the present disclosure, refers to the substitution or deletion of the specified residue, or the insertion of at least one amino acid residue adjacent the specified residue. Insertion “adjacent” to a specified residue means insertion within one to two residues thereof. The insertion may be N-terminal or C-terminal to the specified residue. The preferred amino acid modification herein is a substitution.

[0120] An “affinity-matured” antibody, such as an affinity matured anti-TREM2 antibody of the present disclosure, is one with one or more alterations in one or more HVRs thereof that result in an improvement in the affinity of the antibody for antigen, compared to a parent antibody that does not possess those alteration(s). In one embodiment, an affinity-matured antibody has nanomolar or even picomolar affinities for the target antigen. Affinity-matured antibodies are produced by procedures known in the art. For example, Marks et al., Bio/Technology 10:779-783 (1992) describes affinity maturation by VH- and VL-domain shuffling. Random mutagenesis of HVR and/or framework residues is described by, for example: Barbas et al. Proc Nat. Acad. Sci. USA 91:3809-3813 (1994); Schier et al. Gene 169:147-155 (1995); Yelton et al. J. Immunol. 155:1994-2004 (1995); Jackson et al., J. Immunol. 154(7):3310-9 (1995); and Hawkins et al, J. Mol. Biol. 226:889-896 (1992).

[0121] As use herein, the term “specifically recognizes” or “specifically binds” refers to measurable and reproducible interactions such as attraction or binding between a target and an antibody, such as between an anti-TREM2 antibody and TREM2 that is determinative of the presence of the target in the presence of a heterogeneous population of molecules including biological molecules. For example, an antibody, such as an anti-TREM2 antibody of the present disclosure, that specifically or preferentially binds to a target or an epitope is an antibody that binds this target or epitope with greater affinity, avidity, more readily, and/or with greater duration than it binds to other targets or other epitopes of the target. It is also understood by reading this definition that, for example, an antibody (or a moiety) that specifically or preferentially binds to a first target may or may not specifically or preferentially bind to a second target. As such, “specific binding” or “preferential binding” does not necessarily require (although it can include) exclusive binding. An antibody that specifically binds to a target may have an association constant of at least about 10³ M⁻¹ or 10⁴ M⁻¹, sometimes about 10⁵ M⁻¹ or 10⁶ M⁻¹, in other instances about 10⁶ M⁻¹ or 10⁷ M⁻¹, about 10⁸ M⁻¹ to 10⁹ M⁻¹, or about 10¹⁰ M⁻¹ to 10¹¹M⁻¹ or higher. A variety of immunoassay formats can be used to select antibodies specifically immunoreactive with a particular protein. For example, solid-phase ELISA immunoassays are routinely used to select monoclonal antibodies specifically immunoreactive with a protein. See, e.g., Harlow and Lane (1988) Antibodies, A Laboratory Manual, Cold Spring Harbor Publications, New York, for a description of immunoassay formats and conditions that can be used to determine specific immunoreactivity.

[0122] As used herein, an “interaction” between a TREM2 protein, or DAP12 protein, and a second protein encompasses, without limitation, protein-protein interaction, a physical interaction, a chemical interaction, binding, covalent binding, and ionic binding. As used herein, an antibody “inhibits interaction” between two proteins when the antibody disrupts, reduces, or completely eliminates an interaction between the two proteins. An antibody of the present disclosure, or fragment thereof, “inhibits interaction” between two proteins when the antibody or fragment thereof binds to one of the two proteins.

[0123] An “agonist” antibody or an “activating” antibody is an antibody, such as an agonist anti-TREM2 antibody of the present disclosure, that induces (e.g., increases) one or more activities or functions of the antigen after the antibody binds the antigen.

[0124] An “antagonist” antibody or a “blocking” antibody is an antibody, such as an antagonist anti-TREM2 antibody of the present disclosure, that reduces or eliminates (e.g., decreases) antigen binding to one or more ligand after the antibody binds the antigen, and/or that reduces or eliminates (e.g., decreases) one or more activities or functions of the antigen after the antibody binds the antigen. In some embodiments, antagonist antibodies, or blocking antibodies substantially or completely inhibit antigen binding to one or more ligand and/or one or more activities or functions of the antigen.

[0125] Antibody “effector functions” refer to those biological activities attributable to the Fc region (a native sequence Fc region or amino acid sequence variant Fc region) of an antibody, and vary with the antibody isotype.

[0126] The term “Fc region” herein is used to define a C-terminal region of an immunoglobulin heavy chain, including native-sequence Fc regions and variant Fc regions. Although the boundaries of the Fc region of an immunoglobulin heavy chain might vary, the human IgG heavy-chain Fc region is usually defined to stretch from an amino acid residue at position Cys226, or from Pro230, to the carboxyl-terminus thereof. The C-terminal lysine (residue 447 according to the EU or, Kabat numbering system) of the Fc region may be removed, for example, during production or purification of the antibody, or by recombinantly engineering the nucleic acid encoding a heavy chain of the antibody. Accordingly, a composition of intact antibodies may comprise antibody populations with all K447 residues removed, antibody populations with no K447 residues removed, and antibody populations having a mixture of antibodies with and without the K447 residue. Suitable native-sequence Fc regions for use in the antibodies of the present disclosure include human IgG1, IgG2, IgG3 and IgG4.

[0127] A “native sequence Fc region” comprises an amino acid sequence identical to the amino acid sequence of an Fc region found in nature. Native sequence human Fc regions include a native sequence human IgG1 Fc region (non-A and A allotypes); native sequence human IgG2 Fc region; native sequence human IgG3 Fc region; and native sequence human IgG4 Fc region as well as naturally occurring variants thereof.

[0128] A “variant Fc region” comprises an amino acid sequence which differs from that of a native sequence Fc region by virtue of at least one amino acid modification, preferably one or more amino acid substitution(s). Preferably, the variant Fc region has at least one amino acid substitution compared to a native sequence Fc region or to the Fc region of a parent polypeptide, e.g. from about one to about ten amino acid substitutions, and preferably from about one to about five amino acid substitutions in a native sequence Fc region or in the Fc region of the parent polypeptide. The variant Fc region herein will preferably possess at least about 80% homology with a native sequence Fc region and/or with an Fc region of a parent polypeptide, and most preferably at least about 90% homology therewith, more preferably at least about 95% homology therewith.

[0129] “Fc receptor” or “FcR” describes a receptor that binds to the Fc region of an antibody. The preferred FcR is a native sequence human FcR. Moreover, a preferred FcR is one which binds an IgG antibody (a gamma receptor) and includes receptors of the FcγRI, FcγRII, and FcγRIII subclasses, including allelic variants and alternatively spliced forms of these receptors, FcγRII receptors include FcγRIIA (an “activating receptor”) and FcγRIIB (an “inhibiting receptor”), which have similar amino acid sequences that differ primarily in the cytoplasmic domains thereof. Activating receptor FcγRIIA contains an immunoreceptor tyrosine-based activation motif (“ITAM”) in its cytoplasmic domain. Inhibiting receptor FcγRIIB contains an immunoreceptor tyrosine-based inhibition motif (“ITIM”) in its cytoplasmic domain. (see, e.g., M. Daëron, Annu. Rev. Immunol. 15:203-234 (1997)). FcRs are reviewed in Ravetch and Kinet, Annu. Rev. Immunol. 9:457-92 (1991); Capel et al., Immunomethods 4:25-34 (1994); and de Haas et al., J. Lab. Clin. Med. 126: 330-41 (1995). Other FcRs, including those to be identified in the future, are encompassed by the term “FcR” herein. FcRs can also increase the serum half-life of antibodies.

[0130] Binding to FcRn in vivo and serum half-life of human FcRn high-affinity binding polypeptides can be assayed, e.g., in transgenic mice or transfected human cell lines expressing human FcRn, or in primates to which the polypeptides having a variant Fc region are administered. WO 2004/42072 (Presta) describes antibody variants with improved or diminished binding to FcRs. See also, e.g., Shields et al., J. Biol. Chem. 9(2):6591-6604 (2001).

[0131] As used herein, “percent (%) amino acid sequence identity” and “homology” with respect to a peptide, polypeptide or antibody sequence refers to the percentage of amino acid residues in a candidate sequence that are identical with the amino acid residues in the specific peptide or polypeptide sequence, after aligning the sequences and introducing gaps, if necessary, to achieve the maximum percent sequence identity, and not considering any conservative substitutions as part of the sequence identity. Alignment for purposes of determining percent amino acid sequence identity can be achieved in various ways that are within the skill in the art, for instance, using publicly available computer software such as BLAST, BLAST-2, ALIGN or MEGALIGN™ (DNASTAR) software. Those skilled in the art can determine appropriate parameters for measuring alignment, including any algorithms known in the art needed to achieve maximal alignment over the full-length of the sequences being compared.

[0132] An “isolated” nucleic acid molecule encoding an antibody, such as an anti-TREM2 antibody of the present disclosure, is a nucleic acid molecule that is identified and separated from at least one contaminant nucleic acid molecule with which it is ordinarily associated in the environment in which it was produced. Preferably, the isolated nucleic acid is free of association with all components associated with the production environment. The isolated nucleic acid molecules encoding the polypeptides and antibodies herein is in a form other than in the form or setting in which it is found in nature. Isolated nucleic acid molecules therefore are distinguished from nucleic acid encoding the polypeptides and antibodies herein existing naturally in cells.

[0133] The term “vector,” as used herein, is intended to refer to a nucleic acid molecule capable of transporting another nucleic acid to which it has been linked One type of vector is a “plasmid,” which refers to a circular double stranded DNA into which additional DNA segments may be ligated. Another type of vector is a phage vector. Another type of vector is a viral vector, wherein additional DNA segments may be ligated into the viral genome. Certain vectors are capable of autonomous replication in a host cell into which they are introduced (e.g., bacterial vectors having a bacterial origin of replication and episomal mammalian vectors). Other vectors (e.g., non-episomal mammalian vectors) can be integrated into the genome of a host cell upon introduction into the host cell, and thereby are replicated along with the host genome. Moreover, certain vectors are capable of directing the expression of genes to which they are operatively linked. Such vectors are referred to herein as “recombinant expression vectors,” or simply, “expression vectors.” In general, expression vectors of utility in recombinant DNA techniques are often in the form of plasmids. In the present specification, “plasmid” and “vector” may be used interchangeably as the plasmid is the most commonly used form of vector.

[0134] “Polynucleotide,” or “nucleic acid,” as used interchangeably herein, refer to polymers of nucleotides of any length, and include DNA and RNA. The nucleotides can be deoxyribonucleotides, ribonucleotides, modified nucleotides or bases, and/or their analogs, or any substrate that can be incorporated into a polymer by DNA or RNA polymerase or by a synthetic reaction. A polynucleotide may comprise modified nucleotides, such as methylated nucleotides and their analogs. If present, modification to the nucleotide structure may be imparted before or after assembly of the polymer. The sequence of nucleotides may be interrupted by non-nucleotide components. A polynucleotide may comprise modification(s) made after synthesis, such as conjugation to a label. Other types of modifications include, for example, “caps,” substitution of one or more of the naturally occurring nucleotides with an analog, internucleotide modifications such as, for example, those with uncharged linkages (e.g., methyl phosphonates, phosphotriesters, phosphoamidates, carbamates, etc.) and with charged linkages (e.g., phosphorothioates, phosphorodithioates, etc.), those containing pendant moieties, such as, for example, proteins (e.g., nucleases, toxins, antibodies, signal peptides, ply-L-lysine, etc.), those with intercalators (e.g., acridine, psoralen, etc.), those containing chelators (e.g., metals, radioactive metals, boron, oxidative metals, etc.), those containing alkylators, those with modified linkages (e.g., alpha anomeric nucleic acids, etc.), as well as unmodified forms of the polynucleotides(s). Further, any of the hydroxyl groups ordinarily present in the sugars may be replaced, for example, by phosphonate groups, phosphate groups, protected by standard protecting groups, or activated to prepare additional linkages to additional nucleotides, or may be conjugated to solid or semi-solid supports. The 5′ and 3′ terminal OH can be phosphorylated or substituted with amines or organic capping group moieties of from 1 to 20 carbon atoms. Other hydroxyls may also be derivatized to standard protecting groups. Polynucleotides can also contain analogous forms of ribose or deoxyribose sugars that are generally known in the art, including, for example, 2′-O-methyl-, 2′-O-allyl-, 2′-fluoro- or 2′-azido-ribose, carbocyclic sugar analogs, a-anomeric sugars, epimeric sugars such as arabinose, xyloses or lyxoses, pyranose sugars, furanose sugars, sedoheptuloses, acyclic analogs, and basic nucleoside analogs such as methyl riboside. One or more phosphodiester linkages may be replaced by alternative linking groups. These alternative linking groups include, but are not limited to, embodiments wherein phosphate is replaced by P(O)S (“thioate”), P(S)S (“dithioate”), (O)NR2 (“amidate”), P(O)R, P(O)OR′, CO, or CH2 (“formacetal”), in which each R or R′ is independently H or substituted or unsubstituted alkyl (1-20 C) optionally containing an ether (—O—) linkage, aryl, alkenyl, cycloalkyl, cycloalkenyl or araldyl. Not all linkages in a polynucleotide need be identical. The preceding description applies to all polynucleotides referred to herein, including RNA and DNA.

[0135] A “host cell” includes an individual cell or cell culture that can be or has been a recipient for vector(s) for incorporation of polynucleotide inserts. Host cells include progeny of a single host cell, and the progeny may not necessarily be completely identical (in morphology or in genomic DNA complement) to the original parent cell due to natural, accidental, or deliberate mutation. A host cell includes cells transfected in vivo with a polynucleotide(s) of this invention.

[0136] “Carriers” as used herein include pharmaceutically acceptable carriers, excipients, or stabilizers that are nontoxic to the cell or mammal being exposed thereto at the dosages and concentrations employed. Often the physiologically acceptable carrier is an aqueous pH buffered solution. Examples of physiologically acceptable carriers include buffers such as phosphate, citrate, and other organic acids; antioxidants including ascorbic acid; low molecular weight (less than about 10 residues) polypeptide; proteins, such as serum albumin, gelatin, or immunoglobulins; hydrophilic polymers such as polyvinylpyrrolidone; amino acids such as glycine, glutamine, asparagine, arginine or lysine; monosaccharides, disaccharides, and other carbohydrates including glucose, mannose, or dextrins; chelating agents such as EDTA; sugar alcohols such as mannitol or sorbitol; salt-forming counterions such as sodium; and/or nonionic surfactants such as TWEEN™, polyethylene glycol (PEG), and PLURONICS™.

[0137] The term “about” as used herein refers to the usual error range for the respective value readily known to the skilled person in this technical field. Reference to “about” a value or parameter herein includes (and describes) embodiments that are directed to that value or parameter per se.

[0138] As used herein and in the appended claims, the singular forms “a,” “an,” and “the” include plural reference unless the context clearly indicates otherwise. For example, reference to an “antibody” is a reference to from one to many antibodies, such as molar amounts, and includes equivalents thereof known to those skilled in the art, and so forth.

[0139] It is understood that aspect and embodiments of the present disclosure described herein include “comprising,” “consisting,” and “consisting essentially of” aspects and embodiments.

### Overview

[0140] The present disclosure relates to anti-TREM2 antibodies (e.g., monoclonal antibodies) with one or more agonist or antagonist activities; methods of making and using such antibodies; pharmaceutical compositions containing such antibodies; nucleic acids encoding such antibodies; and host cells containing nucleic acids encoding such antibodies.

[0141] In some embodiments, the agonistic activities of the anti-TREM2 antibodies of the present disclosure are due, at least in part, to the ability of the antibodies to enhance one or more TREM2 activities induced by binding of one or more TREM2 ligands to the TREM2 protein without competing with or otherwise blocking binding of the one or more TREM2 ligands to the TREM2 protein. hi some embodiments, the enhancement of the one or more TREM2 activities by the anti-TREM2 antibodies is compared to the one or more TREM2 activities induced by binding of the one or more TREM2 ligands to the TREM2 protein in the absence of the anti-TREM2 antibodies. In some embodiments, enhancement of one or more TREM2 activities can be determined or tested in vitro or in vivo by any of several techniques disclosed herein (see, e.g., Examples 3-13 and 24).

[0142] Accordingly, certain aspects of the present disclosure are based, at least in part, on the identification of anti-TREM2 antibodies that are capable of binding to both human and mouse TREM2 with high affinity (see, e.g., Example 1); that can activate and enhance (e.g., by synergizing with TREM2 ligands) TREM2 activities (see, e.g., Examples 3-13 and 24). Advantageously, agonist anti-TREM2 antibodies of the present disclosure was shown to be therapeutically effective in treating Alzheimer's disease and symptoms of Alzheimer's disease in several mouse models of Alzheimer's disease (see, e.g., Example 16).

[0143] Further aspects of the present disclosure are based, at least in part, on the surprising discovery that the anti-TREM2 antibodies of the present disclosure can also induce antagonistic activities when the antibody is produced or otherwise formatted such that it is incapable of inducing or retaining TREM2 receptor clustering. In some embodiments, anti-TREM2 antibodies of the present disclosure exhibit one or more antagonistic TREM2 activities, including, without limitation, inhibition of TREM2-dependent gene activation (see, e.g., Examples 7 and 8).

### TREM2 Proteins

[0144] In one aspect, the present disclosure provides antibodies that bind to a TREM2 protein of the present disclosure and induce one or more TREM2 activities and/or enhance one or more TREM2 activities after binding to a TREM2 protein expressed in a cell.

[0145] TREM2 proteins of the present disclosure include, without limitation, a human TREM2 protein (Uniprot Accession No. Q9NZC2; SEQ ID NO: 1), and a non-human mammalian TREM2 protein, such as mouse TREM2 protein (Uniprot Accession No. Q99NH8; SEQ ID NO: 2), rat TREM2 protein (Uniprot Accession No. D3ZZ89; SEQ ID NO: 3), Rhesus monkey TREM2 protein (Uniprot Accession No. F6QVF2; SEQ ID NO: 4), bovine TREM2 protein (Uniprot Accession No. Q05B59; SEQ ID NO: 5), equine TREM2 protein (Uniprot Accession No. F7D6LO; SEQ ID NO: 6), pig TREM2 protein (Uniprot Accession No. H2EZZ3; SEQ ID NO: 7), and dog TREM2 protein (Uniprot Accession No. E2RP46; SEQ ID NO: 8). As used herein “TREM2 protein” refers to both wild-type sequences and naturally occurring variant sequences.

[0146] Triggering receptor expressed on myeloid cells-2 (TREM2) is variously referred to as TREM-2, TREM2a, TREM2b, TREM2c, triggering receptor expressed on myeloid cells-2a, and triggering receptor expressed on monocytes-2. TREM2 is a 230 amino acid membrane protein. TREM2 is an immunoglobulin-like receptor primarily expressed on myeloid lineage cells, including without limitation, macrophages, dendritic cells, monocytes, Langerhans cells of skin, Kupffer cells, osteoclasts, and microglia. In some embodiments, TREM2 forms a receptor signaling complex with DAP12. In some embodiments, TREM2 phosphorylates and signals through DAP12 (an ITAM domain adaptor protein). In some embodiments TREM2 signaling results in the downstream activation of PI3K or other intracellular signals. On Myeloid cells, Toll-like receptor (TLR) signals are important for the activation of TREM2 activities, e.g., in the context of an infection response. TLRs also play a key role in the pathological inflammatory response, e.g., TLRs expressed in macrophages and dendritic cells.

[0147] In some embodiments, an example of a human TREM2 amino acid sequence is set forth below as SEQ ID NO: 1:

```
                10 20 30 40
MEPLRLLILL FVTELSGAHN TTVFQGVAGQ SLQVSCPYDS
                50 60 70 80
MKHWGRRKAW CRQLGEKGPC QRVVSTHNLW LLSFLRRWNG
                90 100 110 120
STAITDDTLG GTLTITLRNL QPHDAGLYQC QSLHGSEADT
              130 140 150 160
LRKVLVEVLA DPLDHRDAGD LWFPGESESF EDAHVEHSIS
              170 180 190 200
RSLLEGEIPF PPTSILLLLA CIFLIKILAA SALWAAAWHG
              210 220 230
QKPGTHPPSE LDCGHDPGYQ LQTLPGLRDT
```

[0148] In some embodiments, the human TREM2 is a preprotein that includes a signal peptide. In some embodiments, the human TREM2 is a mature protein. In some embodiments, the mature TREM2 protein does not include a signal peptide. In some embodiments, the mature TREM2 protein is expressed on a cell. In some embodiments, TREM2 contains a signal peptide located at amino acid residues 1-18 of human TREM2 (SEQ ID NO: 1); an extracellular immunoglobulin-like variable-type (IgV) domain located at amino acid residues 29-112 of human TREM2 (SEQ ID NO: 1); additional extracellular sequences located at amino acid residues 113-174 of human TREM2 (SEQ ID NO: 1); a transmembrane domain located at amino acid residues 175-195 of human TREM2 (SEQ ID NO: 1); and an intracellular domain located at amino acid residues 196-230 of human TREM2 (SEQ ID NO: 1).

[0149] The transmembrane domain of human TREM2 contains a lysine at amino acid residue 186 that can interact with an aspartic acid in DAP12, which is a key adaptor protein that transduces signaling from TREM2, TREM1, and other related IgV family members.

[0150] Homologues of human TREM2 include, without limitation, the natural killer (NK) cell receptor NK-p44 (NCTR2), the polymeric immunoglobulin receptor (pIgR), CD300E, CD300A, CD300C, and TREML1/TLT1. In some embodiments, NCTR2 has similarity with TREM2 within the IgV domain.

### DAP12 Proteins

[0151] In one aspect, the present disclosure provides antibodies that may further bind to a DAP12 protein of the present disclosure and modulate one or more DAP12 activities after binding to a DAP12 protein expressed in a cell.

[0152] DAP12 proteins of the present disclosure include, without limitation, a mammalian (e.g., non-human mammal) DAP12 protein, human DAP12 protein (Uniprot Accession No. 043914), mouse DAP12 protein (Uniprot Accession No. 054885), rat DAP12 protein (Uniprot Accession No. Q6X9T7), Rhesus monkey DAP12 protein (Uniprot Accession No. Q8WNQ8), bovine DAP12 protein (Uniprot Accession No. Q95J80), and pig DAP12 protein (Uniprot Accession No. Q9TU45). As used herein “DAP12 protein” refers to both wild-type sequences and naturally occurring variant sequences.

[0153] DNAX-activation protein 12 (DAP12) is variously referred to as Killer-activating receptor-associated protein, KAR-associated protein (KARAP), PLOSL, PLO-SL, TYRO protein, and tyrosine kinase-binding protein. DAP12 is a 113 amino acid membrane protein. In some embodiments, DAP12 functions as a transmembrane signaling polypeptide, which contains an immunoreceptor tyrosine-based activation motif (ITAM) in its cytoplasmic domain. It may associate with the killer-cell inhibitory receptor (KIR) family of membrane glycoproteins and may act as an activating signal transduction element. In other embodiments, the DAP12 protein may bind zeta-chain (TCR) associated protein kinase 70 kDa (ZAP-70) and spleen tyrosine kinase (SYK), and play a role in signal transduction, bone modeling, brain myelination, and inflammation.

[0154] Mutations within the DAP12-encoding gene have been associated with polycystic lipomembranous osteodysplasia with sclerosing leukoencephalopathy (PLOSL), also known as Nasu-Hakola disease. Without wishing to be bound by theory, it is believed that the DAP12 receptor is TREM2, which also causes PLOSL. Multiple alternative transcript variants encoding distinct isoforms of DAP12 have been identified. DAP12 non-covalently associates with activating receptors of the CD300 family. Cross-linking of CD300-TYROBP/DAP12 complexes results in cellular activation, such as neutrophil activation mediated by integrin. DAP12 is a homodimer; disulfide-linked protein. In some embodiments, DAP12 interacts with SIRPB1, TREM1, CLECSFS, SIGLEC14, CD300LB, CD300E, and CD300D by similarity and via ITAM domain, as well as with SYK via SH2 domain. In other embodiments, DAP12 activates SYK, which mediates neutrophils and macrophages integrin-mediated activation. In other embodiments, DAP12 interacts with KLRC2 and KIR2DS3.

[0155] In some embodiments, an example of a human DAP12 amino acid sequence is set forth below as SEQ ID NO: 887:

```
                10 20 30 40
MGGLEPCSRL LLLPLLLAVS GLRPVQAQAQ SDCSCSTVSP
                50 60 70 80
GVLAGIVMGD LVLTVLIALA VYFLGRLVPR GRGAAEAATR
                90 100 110
KQRITETESP YQELQGQRSD VYSDLNTQRPYYK
```

[0156] In some embodiments, the human DAP12 is a preprotein that includes a signal peptide. In some embodiments, the human DAP12 is a mature protein. In some embodiments, the mature DAP12 protein does not include a signal peptide. In some embodiments, the mature DAP12 protein is expressed on a cell. DAP12 is a single-pass type I membrane protein. It contains an extracellular domain located at amino acid residues 22-40 of human DAP12 (SEQ ID NO: 887); a transmembrane domain located at amino acid residues 41-61 of human DAP12 (SEQ ID NO: 887); and an intracellular domain located at amino acid residues 62-113 of human DAP12 (SEQ ID NO: 887). The immunoreceptor tyrosine-based activation motif (ITAM) domain is located at amino acid residues 80-118 of human DAP12 (SEQ ID NO: 887).

[0157] In some embodiments, an aspartic acid residue in DAP12 interacts with the transmembrane domain of human TREM2 containing a lysine at amino acid residue 186, and transduces signaling from TREM2, TREM1, and other related IgV family member proteins.

### Anti-TREM2 Antibodies

[0158] Certain aspects of the present disclosure relate to antibodies (e.g., monoclonal antibodies) that specifically bind to TREM2. In some embodiments, antibodies of the present disclosure bind a mature TREM2 protein. In some embodiments, antibodies of the present disclosure bind a mature TREM2 protein, wherein the mature TREM2 protein is expressed on a cell. In some embodiments, antibodies of the present disclosure bind a TREM2 protein expressed on one or more human cells selected from human dendritic cells, human macrophages, human monocytes, human osteoclasts, human Langerhans cells of skin, human Kupffer cells, human microglia, and any combinations thereof. In some embodiments, antibodies of the present disclosure are agonist antibodies. In some embodiments, antibodies of the present disclosure are inert antibodies. In some embodiments, antibodies of the present disclosure are antagonist antibodies.

[0159] In some embodiments, anti-TREM2 antibodies of the present disclosure bind to a TREM2 protein without competing with, inhibiting, or otherwise blocking one or more TREM2 ligands from binding to the TREM2 protein. Examples of suitable TREM2 ligands include, without limitation, TREM2 ligands expressed by E. coli cells, apoptotic cells, nucleic acids, anionic lipids, APOE, APOE2, APOE3, APOE4, anionic APOE, anionic APOE2, anionic APOE3, anionic APOE4, lipidated APOE, lipidated APOE2, lipidated APOE3, lipidated APOE4, zwitterionic lipids, negatively charged phospholipids, phosphatidylserine, sulfatides, phosphatidylcholin, sphingomyelin, membrane phospholipids, lipidated proteins, proteolipids, lipidated peptides, and lipidated amyloid beta peptide. Accordingly, in certain embodiments, the one or more TREM2 ligands comprise E. coli cells, apoptotic cells, nucleic acids, anionic lipids, zwitterionic lipids, negatively charged phospholipids, phosphatidylserine (PS), sulfatides, phosphatidylcholin, sphingomyelin (SM), phospholipids, lipidated proteins, proteolipids, lipidated peptides, and lipidated amyloid beta peptide.

[0160] In some embodiments, anti-TREM2 antibodies of the present disclosure do not inhibit the growth of one or more innate immune cells. In some embodiments, anti-TREM2 antibodies of the present disclosure bind to one or more primary immune cells with a K_{D} of less than 50 nM, less than 45 nM, less than 40 nM, less than 35 nM, less than 30 nM, less than 25 nM, less than 20 nM, less than 15 nM, less than 10 nM, less than 9 nM, less than 8 nM, less than 7 nM, less than 6 nM, less than 5 nM, less than 4 nM, less than 3 nM, less than 2 nM, or less than 1 nM. In some embodiments, an anti-TREM2 antibody of the present disclosure accumulates in the brain, or the cerebrospinal fluid (CSF), or both to an extent that is 1% or more, 2% or more, 3% or more, 4% or more, 5% or more, 6% or more, 7% or more, 8% or more, 9% or more, 10% or more of the concentration of the antibody in the blood. In some embodiments, the dissociation constant (K_{D}) is determined at a temperature of approximately 4° C. In some embodiments, the K_{D} is determined using a monovalent antibody (e.g., a Fab) or a full-length antibody in a monovalent form. Methods for the preparation and selection of antibodies that interact and/or bind with specificity to TREM2 are described herein. (e.g., see Example 1).

[0161] Agonist Anti-TREM2 Antibodies

[0162] Anti-TREM2 antibodies of the present disclosure generally bind to one or more TREM2 proteins expressed on a cell. One class of antibodies is agonist antibodies. For example, the TREM2 receptor is thought to require clustering on the cell surface in order to transduce a signal. Thus agonist antibodies may have unique features to stimulate, for example, the TREM2 receptor. For example, they may have the correct epitope specificity that is compatible with receptor activation, as well as the ability to induce or retain receptor clustering on the cell surface. In addition, agonist anti-TREM2 antibodies of the present disclosure may display the ability to bind TREM2 without blocking simultaneous binding of one or more TREM2 ligands. The anti-TREM2 antibodies of the present disclosure may further display additive and/or synergistic functional interactions with one or more TREM2 ligands. Thus, in some embodiments, the maximal activity of TREM2 when bound to anti-TREM2 antibodies of the present disclosure in combination with one or more TREM2 ligands of the present disclosure may be greater (e.g., enhanced) than the maximal activity of TREM2 when exposed to saturating concentrations of ligand alone or to saturating concentrations of the antibody alone. In addition, the activity of TREM2 at a given concentration of TREM2 ligand may be greater (e.g., enhanced) in the presence of the antibody. Accordingly, in some embodiments, anti-TREM2 antibodies of the present disclosure have an additive effect with the one or more TREM2 ligands to enhance the one or more TREM2 activities when bound to the TREM2 protein. In some embodiments, anti-TREM2 antibodies of the present disclosure synergize with the one or more TREM2 ligands to enhance the one or more TREM2 activities. In some embodiments, anti-TREM2 antibodies of the present disclosure increase the potency of the one or more TREM2 ligands to induce the one or more TREM2 activities, as compared to the potency of the one or more TREM2 ligands to induce the one or more TREM2 activities in the absence of the antibody. In some embodiments, anti-TREM2 antibodies of the present disclosure enhance the one or more TREM2 activities in the absence of cell surface clustering of TREM2. In some embodiments, anti-TREM2 antibodies of the present disclosure enhance the one or more TREM2 activities by inducing or retaining cell surface clustering of TREM2. In some embodiments, anti-TREM2 antibodies of the present disclosure are clustered by one or more Fc-gamma receptors expressed on one or more immune cells, including without limitation, B cells and microglial cells. In some embodiments, enhancement of the one or more TREM2 activities induced by binding of one or more TREM2 ligands to the TREM2 protein is measured on primary cells, including without limitation, dendritic cells, bone marrow-derived dendritic cells, monocytes, microglia, macrophages, neutrophils, NK cells, osteoclasts, Langerhans cells of skin, and Kupffer cells, or on cell lines, and the enhancement of the one or more TREM2 activities induced by binding of one or more TREM2 ligands to the TREM2 protein is measured, for example, utilizing an in vitro cell assay.

[0163] In vivo, anti-TREM2 antibodies of the present disclosure may activate receptors by multiple potential mechanisms. In some embodiments, agonistic anti-TREM2 antibodies of the present disclosure, have, due to the correct epitope specificity, the ability to activate TREM2 in solution without having to be clustered with a secondary antibody, bound on plates, or clustered through Fcg receptors. In some embodiments, anti-TREM2 antibodies of the present disclosure have isotypes of human antibodies, such as IgG2, that have, due to their unique structure, an intrinsic ability to cluster receptors or retain receptors in a clustered configuration, thereby activating receptors such as TREM2 without binding to an Fc receptor (e.g., White et al., (2015) Cancer Cell 27, 138-148).

[0164] In some embodiments, anti-TREM2 antibodies of the present disclosure cluster receptors (e.g., TREM2) by binding to Fcg receptors on adjacent cells. Binding of the constant IgG Fc part of the antibody to Fcg receptors leads to aggregation of the antibodies, and the antibodies in turn aggregate the receptors to which they bind through their variable region (Chu et al (2008) Mol Immunol, 45:3926-3933; and Wilson et al., (2011) Cancer Cell 19, 101-113). Binding to the inhibitory Fcg receptor FcgR (FcgRIIB) that does not elicit cytokine secretion, oxidative burst, increased phagocytosis, and enhanced antibody-dependent, cell-mediated cytotoxicity (ADCC) is often a preferred way to cluster antibodies in vivo, since binding to FcgRIIB is not associated with immune adverse effects. Any suitable assay described herein (see, e.g., Example 4) may be used to determine antibody clustering.

[0165] Other mechanisms may also be used to cluster receptors (e.g., TREM2). For example, in some embodiments, antibody fragments (e.g., Fab fragments) that are cross-linked together may be used to cluster receptors (e.g., TREM2) in a manner similar to antibodies with Fc regions that bind Fcg receptors, as described above. In some embodiments, cross-linked antibody fragments (e.g., Fab fragments) may function as agonist antibodies if they induce receptor clustering on the cell surface and bind an appropriate epitope on the target (e.g., TREM2).

[0166] In some embodiments, antibodies of the present disclosure that bind a TREM2 protein may include agonist antibodies that due to their epitope specificity bind TREM2 and activate one or more TREM2 activities. In some embodiments, such antibodies may bind to the ligand-binding site on TREM2 and mimic the action of one or more TREM2 ligands, or stimulate the target antigen to transduce signal by binding to one or more domains that are not the ligand-binding sites. In some embodiments, the antibodies do not compete with or otherwise block ligand binding to TREM2. In some embodiments, the antibodies, act additively or synergistically with one or more TREM2 ligands to activate and/or enhance one more TREM2 activities.

[0167] In some embodiments, TREM2 activities that may be induced and/or enhanced by anti-TREM2 antibodies of the present disclosure and/or one or more TREM2 ligands of the present disclosure include, without limitation, TREM2 binding to DAP12; TREM2 phosphorylation; DAP12 phosphorylation; activation of one or more tyrosine kinases, optionally where the one or more tyrosine kinases comprise a Syk kinase, ZAP70 kinase, or both; activation of phosphatidylinositol 3-kinase (PI3K); activation of protein kinase B (Akt); recruitment of phospholipase C-gamma (PLC-gamma) to a cellular plasma membrane, activation of PLC-gamma, or both; recruitment of TEC-family kinase dVav to a cellular plasma membrane; activation of nuclear factor-rB (NF-rB); inhibition of MAPK signaling; phosphorylation of linker for activation of T cells (LAT), linker for activation of B cells (LAB), or both; activation of IL-2-induced tyrosine kinase (Itk); modulation of one or more pro-inflammatory mediators selected from IFN-β, IL-1α, IL-1β, TNF-α, YM-1, IL-6, IL-8, CRP, CD86, MCP-1/CCL2, CCL3, CCL4, CCL5, CCR2, CXCL-10, Gata3, Rorc, IL-20 family members, IL-33, LIF, IFN-gamma, OSM, CNTF, GM-CSF, CSF-1, MHC-II, OPN, CD11c, GM-CSF, IL-11, IL-12, IL-17, IL-18, and IL-23, optionally where the modulation occurs in one or more cells selected from macrophages, M1 macrophages, activated M1 macrophages, M2 macrophages, dendritic cells, monocytes, osteoclasts, Langerhans cells of skin, Kupffer cells, and microglial cells; modulation of one or more anti-inflammatory mediators selected from IL-4, IL-10 TGF-β, IL-13, IL-35 IL-16, IFN-alpha, IL-1Ra, VEGF, G-CSF, YM, AXL, FLT1, and soluble receptors for TNF or IL-6, optionally wherein the modulation occurs in one or more cells selected from macrophages, M1 macrophages, activated M1 macrophages, M2 macrophages, dendritic cells, monocytes, osteoclasts, Langerhans cells of skin, Kupffer cells, and microglial cells; modulation of one or more genes whose expression is increased upon induction of inflammation, optionally wherein the one or more genes are selected from Fabp3, Fabp5, and LDR; phosphorylation of extracellular signal-regulated kinase (ERK); modulation of one or more genes whose expression is increased upon induction of inflammation, optionally wherein the one or more genes are selected from the group consisting of Fabp3, Fabp5, and LDR; modulated expression of C-C chemokine receptor 7 (CCR7) in one or more cells selected from macrophages, M1 macrophages, activated M1 macrophages, M2 macrophages, dendritic cells, monocytes, osteoclasts, Langerhans cells of skin, Kupffer cells, microglia, M1 microglia, activated M1 microglia, and M2 microglia, and any combination thereof; induction of microglial cell chemotaxis toward CCL19 and CCL21 expressing cells; normalization of disrupted TREM2/DAP12-dependent gene expression; recruitment of Syk, ZAP70, or both to a DAP12/TREM2 complex; increasing activity of one or more TREM2-dependent genes, optionally where the one or more TREM2-dependent genes comprise nuclear factor of activated T-cells (NFAT) transcription factors; increased maturation of dendritic cells, monocytes, microglia, M1 microglia, activated M1 microglia, and M2 microglia, macrophages, M1 macrophages, activated M1 macrophages, M2 macrophages, or any combination thereof; increased ability of dendritic cells, monocytes, microglia, M1 microglia, activated M1 microglia, and M2 microglia, macrophages, M1 macrophages, activated M1 macrophages, M2 macrophages, or any combination thereof to prime or modulate the function of T cells, optionally wherein the T cells are one or more cells selected from CD8+ T cells, CD4+T cells regulatory T cells, and any combination thereof; enhanced ability, normalized ability, or both of bone marrow-derived dendritic cells to prime or modulate function of antigen-specific T cells, optionally wherein the antigen-specific T cells are one or more cells selected from CD8+ T cells, CD4+T cells regulatory T cells, and any combination thereof; induction of osteoclast production, increased rate of osteoclastogenesis, or both; increased survival of dendritic cells, macrophages, M1 macrophages, activated M1 macrophages, M2 macrophages, monocytes, osteoclasts, Langerhans cells of skin, Kupffer cells, microglia, M1 microglia, activated M1 microglia, and M2 microglia, or any combination thereof; increasing the function of dendritic cells, macrophages, M1 macrophages, activated M1 macrophages, M2 macrophages, microglia, M1 microglia, activated M1 microglia, and M2 microglia, or any combination thereof; increasing phagocytosis by dendritic cells, macrophages, M1 macrophages, activated M1 macrophages, M2 macrophages, monocytes, microglia, M1 microglia, activated M1 microglia, and M2 microglia, or any combination thereof; induction of one or more types of clearance selected from apoptotic neuron clearance, nerve tissue debris clearance, non-nerve tissue debris clearance, bacteria or other foreign body clearance, disease-causing agent clearance, tumor cell clearance, or any combination thereof, optionally where the disease-causing agent is selected from amyloid beta or fragments thereof, Tau, IAPP, alpha-synuclein, TDP-43, FUS protein, prion protein, PrPSc, huntingtin, calcitonin, superoxide dismutase, ataxin, Lewy body, atrial natriuretic factor, islet amyloid polypeptide, insulin, apolipoprotein AI, serum amyloid A, medin, prolactin, transthyretin, lysozyme, beta 2 microglobulin, gelsolin, keratoepithelin, cystatin, immunoglobulin light chain AL, S-IBM protein, and Repeat-associated non-ATG (RAN) translation products including DiPeptide Repeats, (DPRs peptides) composed of glycine-alanine (GA), glycine-proline (GP), glycine-arginine (GR), proline-alanine (PA), or proline-arginine (PR), antisense GGCCCC (G2C4) repeat-expansion RNA; induction of phagocytosis of one or more of apoptotic neurons, nerve tissue debris, non-nerve tissue debris, bacteria, other foreign bodies, disease-causing agents, tumor cells, or any combination thereof, optionally where the disease-causing agent is selected from amyloid beta or fragments thereof, Tau, IAPP, alpha-synuclein, TDP-43, FUS protein, prion protein, PrPSc, huntingtin, calcitonin, superoxide dismutase, ataxin, Lewy body, atrial natriuretic factor, islet amyloid polypeptide, insulin, apolipoprotein AI, serum amyloid A, medin, prolactin, transthyretin, lysozyme, beta 2 microglobulin, gelsolin, keratoepithelin, cystatin, immunoglobulin light chain AL, S-IBM protein, and Repeat-associated non-ATG (RAN) translation products including DiPeptide Repeats, (DPRs peptides) composed of glycine-alanine (GA), glycine-proline (GP), glycine-arginine (GR), proline-alanine (PA), or proline-arginine (PR), antisense GGCCCC (G2C4) repeat-expansion RNA; modulated expression of one or more stimulatory molecules selected from CD83, CD86 MHC class II, CD40, and any combination thereof, optionally where the CD40 is expressed on dendritic cells, monocytes, macrophages, or any combination thereof, and optionally where the dendritic cells comprise bone marrow-derived dendritic cells; modulating secretion of one or more pro-inflammatory mediators, optionally where the one or more inflammatory mediators are selected from IFN-β, IL-1α, IL-1β, CD86, TNF-α, IL-6, IL-8, CRP, MCP-1/CCL2, CCL3, CCL4, CCL5, CCR2, CXCL-10, Gata3, IL-20 family members, IL-33, LIF, IFN-gamma, OSM, CNTF, CSF1, OPN, CD11c, GM-CSF, IL-11, IL-12, IL-17, IL-18, and IL-23, and any combination thereof; modulation of one or more anti-inflammatory mediators selected from the group consisting of IL-4, IL-10 TGF-β, IL-13, IL-35 IL-16, IFN-alpha, IL-1Ra, VEGF, G-CSF, YM, AXL, FLT1, and soluble receptors for TNF or IL-6, and any combination thereof; modulating expression of one or more proteins selected from C1qa, C1qB, C1qC, C1s, C1R, C4, C2, C3, ITGB2, HMOX1, LAT2. CASP1, CSTA, VSIG4, MS4A4A, C3AR1, GPX1, TyroBP, ALOXSAP, ITGAM, SLC7A7, CD4, ITGAX, PYCARD, and VEGF; increasing memory; and reducing cognitive deficit. In some embodiments, anti-TREM2 antibodies of the present disclosure increase memory and/or reduce cognitive deficit when administered to an individual.

[0168] As used herein, an anti-TREM2 antibody of the present disclosure enhances one or more TREM2 activities induced by binding of one or more TREM2 ligands to the TREM2 protein if it induces at least a 2-fold, at least a 3-fold, at least a 4-fold, at least a 5-fold, at least a 6-fold, at least a 7-fold, at least a 8-fold, at least a 9-fold, at least a 10-fold, at least an 11-fold, at least a 12-fold, at least a 13-fold, at least a 14-fold, at least a 15-fold, at least a 16-fold, at least a 17-fold, at least an 18-fold, at least a 19-fold, at least a 20-fold or greater increase in the one or more TREM2 activities as compared to levels of the one or more TREM2 activities induced by binding of one or more TREM2 ligands to the TREM2 protein in the absence of the anti-TREM2 antibody. In some embodiments, the increase in one more TEM2 activities may be measured by any suitable in vitro cell-based assays or suitable in vivo model described herein or known in the art, for example, by utilizing a luciferase-based reporter assay to measure TREM2-dependent gene expression, using Western blot analysis to measure increase in TREM2-induced phosphorylation of downstream signaling partners, such as Syk, or by utilizing flow cytometry, such as fluorescence-activated cell sorting (FACS) to measure changes in cell surface levels of markers of TREM2 activation. Any in vitro cell-based assays or suitable in vivo model described herein or known in the art may be used to measure interaction (e.g., binding) between TREM2 and one or more TREM2 ligands.

[0169] In some embodiments an anti-TREM2 antibody of the present disclosure enhances one or more TREM2 activities induced by binding of a TREM2 ligand to the TREM2 protein if it induces an increase that ranges from about 1-fold to about 6-fold, or more than 6-fold in ligand-induced TREM2-dependent gene transcription when used at a concentration that ranges from about 0.5 nM to about 50 nM, or greater than 50 nM, and as compared to the level of TREM2-dependent gene transcription induced by binding of the TREM2 ligand to the TREM2 protein in the absence of the anti-TREM2 antibody when the TREM2 ligand is used at its EC₅₀ concentration. In some embodiments the increase in ligand-induced TREM2-dependent gene transcription is at least 1-fold, at least 2-fold, at least a 3-fold, at least a 4-fold, at least a 5-fold, at least a 6-fold, at least a 7-fold, at least a 8-fold, at least a 9-fold, at least a 10-fold, at least an 11-fold, at least a 12-fold, at least a 13-fold, at least a 14-fold, at least a 15-fold, at least a 16-fold, at least a 17-fold, at least an 18-fold, at least a 19-fold, at least a 20-fold or greater when used at a concentration that ranges from about 0.5 nM to about 50 nM, or greater than 50 nM, and as compared to the level of TREM2-dependent gene transcription induced by binding of the TREM2 ligand to the TREM2 protein in the absence of the anti-TREM2 antibody when the TREM2 ligand is used at its EC₅₀ concentration. In some embodiments, the anti-TREM2 antibody is used at a concentration of at least 0.5 nM, at least 0.6 nM, at least 0.7 nM, at least 0.8 nM, at least 0.9 nM, at least 1 nM, at least 2 nM, at least 3 nM, at least 4 nM, at least 5 nM, at least 6 nM, at least 7 nM, at least 8 nM, at least 9 nM, at least 10 nM, at least 15 nM, at least 20 nM, at least 25 nM, at least 30 nM, at least 35 nM, at least 40 nM, at least 45 nM, at least 46 nM, at least 47 nM, at least 48 nM, at least 49 nM, or at least 50 nM. In some embodiments, the TREM2 ligand is phosphatidylserine (PS). In some embodiments, the TREM2 ligand is sphingomyelin (SM). In some embodiments, the increase in one more TEM2 activities may be measured by any suitable in vitro cell-based assays or suitable in vivo model described herein or known in the art. In some embodiments, a luciferase-based reporter assay is used to measure the fold increase of ligand-induced TREM2-dependent gene expression in the presence and absence of antibody, as described in Example 8, FIG. 10A-10F and FIG. 11A-11D.

[0170] As used herein, an anti-TREM2 antibody of the present disclosure does not compete with, inhibit, or otherwise block the interaction (e.g., binding) between one or more TREM2 ligands and TREM2 if it decreases ligand binding to TREM2 by less than 20% at saturating antibody concentrations utilizing any in vitro assay or cell-based culture assay described herein or known in the art. In some embodiments, anti-TREM2 antibodies of the present disclosure inhibit interaction (e.g., binding) between one or more TREM2 ligands and TREM2 by less than 20%, less than 19%, less than 18%, less than 17%, less than 16%, less than 15%, less than 14%, less than 13%, less than 12%, less than 11%, less than 10%, less than 9%, less than 8%, less than 7%, less than 6%, less than 5%, less than 4%, less than 3%, less than 2%, or less than 1% at saturating antibody concentrations utilizing any in vitro assay or cell-based culture assay described herein or known in the art.

[0171] In some embodiments, an anti-TREM2 antibody of the present disclosure is an agonist antibody that induces one or more TREM2 activities. In some embodiments the antibody induces one or more activities of TREM2 after binding to a TREM2 protein that is expressed on a cell. In some embodiments the antibody induces one or more activities of TREM2 after binding to a soluble TREM2 protein that is not bound to the cell membrane. In certain embodiments the TREM2 protein is expressed on a cell surface. In certain embodiments, soluble TREM2 protein (sTREM2) may be found, without limitation, in extracellular milieu, in blood serum, in cerebrospinal fluid (CSF), and in the interstitial space within tissues. In certain embodiments, soluble TREM2 protein (sTREM2) is non-cellular. In some embodiments, anti-TREM2 antibodies of the present disclosure increase levels of soluble TREM2 protein (sTREM2) and/or increase the half-life of soluble TREM2 protein (sTREM2). In some embodiments a soluble TREM2 (sTREM2) protein of the present disclosure corresponds to amino acid residues 19-160 of SEQ ID NO:1. In some embodiments a soluble TREM2 (sTREM2) protein of the present disclosure corresponds to amino acid residues 19-159 of SEQ ID NO:1. In some embodiments a soluble TREM2 (sTREM2) protein of the present disclosure corresponds to amino acid residues 19-158 of SEQ ID NO:1. In some embodiments a soluble TREM2 (sTREM2) protein of the present disclosure corresponds to amino acid residues 19-157 of SEQ ID NO:1. In some embodiments a soluble TREM2 (sTREM2) protein of the present disclosure corresponds to amino acid residues 19-156 of SEQ ID NO:1. In some embodiments a soluble TREM2 (sTREM2) protein of the present disclosure corresponds to amino acid residues 19-155 of SEQ ID NO:1. In some embodiments a soluble TREM2 (sTREM2) protein of the present disclosure corresponds to amino acid residues 19-154 of SEQ ID NO:1.

[0172] In some embodiments, soluble TREM2 (sTREM2) proteins of the present disclosure may be inactive variants of cellular TREM2 receptors. In some embodiments, sTREM2 may be present in the periphery, such as in the plama, or brains of subject, and may sequester anti-TREM2 antibodies. Such sequestered antibodies would be unable to bind to and activate, for example, the cellular TREM2 resceptor present on cells. Accordingly, in certain embodiments, anti-TREM2 antibodies of the present disclosure, such as agonist anti-TREM2 antibodies of the present disclosure, do not bind to soluble TREM2. In some embodiments, anti-TREM2 antibodies of the present disclosure, such as agonist anti-TREM2 antibodies of the present disclosure, do not bind to soluble TREM2 in vivo. In some embodiments, agonist anti-TREM2 antibodies of the present disclosure that do not bind soluble TREM2 may bind to an epitope on TREM2 that, for example, may include a portion of the extracellular domain of cellular TREM2 that is not contained in sTREM2, for example one or more amino acid residues within amino acid residues 161-175; may be at or near a transmembrane portion of TREM2; or may include a transmembrane portion of TREM2. In some embodiments, such antibodies may bind to an epitope that includes amino acid residues E151, D152, H154, and E156 of SEQ ID NO: 1. In some embodiments, such antibodies may bind to an epitope that includes the N-terminal regions of the extra-cellular domain of TREM2. Thus, such anti-TREM2 antibodies bind cellular TREM2 without binding soluble TREM2. Advantageously, such anti-TREM2 antibodies will not be questered by sTREM2 present, for example, in the periphery or brain, and will thus be available to activate the cellular TREM2 receptor present on cells.

[0173] The TREM2 activities induced by anti-TREM2 antibodies of the present disclosure may include, (a) modulated expression of one or more anti-inflammatory cytokines, optionally wherein the one or more anti-inflammatory cytokines are selected from IL-4, IL-10 TGF-β, IL-13, IL-35 IL-16, IFN-alpha, IL-1Ra, VEGF, G-CSF, YM, AXL, FLT1 and soluble receptors for TNF or IL-6; (b) modulated expression of one or more anti-inflammatory cytokines in one or more cells selected from macrophages, dendritic cells, bone marrow-derived dendritic cells, monocytes, osteoclasts, and microglial cells; (c) modulated expression of one or more pro-inflammatory cytokines, optionally wherein the one or more pro-inflammatory cytokines are selected from IFN-β, IL-1α, IL-1β, TNF-α, IL-6, IL-8, CRP, IL-20 family members, IL-33, LIF, IFN-gamma, OSM, CNTF, GM-CSF, IL-11, IL-12, IL-17, IL-18, IL-23, CXCL10, CCL4, and MCP-1; (d) modulated expression of one or more pro-inflammatory cytokines in one or more cells selected from macrophages, dendritic cells, bone marrow-derived dendritic cells, monocytes, osteoclasts, and microglial cells; (e) activation of extracellular signal-regulated kinase (ERK) phosphorylation; (f) activating tyrosine phosphorylation on multiple cellular proteins; (g) modulated expression of C-C chemokine receptor 7 (CCR7); (h) activation of microglial cell chemotaxis toward CCL19 and CCL21 expressing cells; (i) increasing priming and/or modulating function of one or more T cells, such as CD8+ T cells, CD4+ T cells and/or regulatory T cell by one or more cells selected from dendritic cells, bone marrow-derived dendritic cells, monocytes, microglia, M1 microglia, activated M1 microglia, M2 microglia, macrophages, M1 macrophages, activated M1 macrophages, and M2 macrophages; (j) activation of osteoclast production, increased rate of osteoclastogenesis, or both; (k) increased survival of one or more cells selected from dendritic cells, bone marrow-derived dendritic cells, macrophages, M1 macrophages, activated M1 macrophages, M2 macrophages, monocytes, osteoclasts, T cells, T helper cells, cytotoxic T cells, granulocytes, neutrophils, microglia, M1 microglia, activated M1 microglia, and M2 microglia; (1) increased proliferation of one or more cells selected from dendritic cells, bone marrow-derived dendritic cells, macrophages, M1 macrophages, activated M1 macrophages, M2 macrophages, monocytes, osteoclasts, T cells, T helper cells, cytotoxic T cells, granulocytes, neutrophils, microglia, M1 microglia, activated M1 microglia, and M2 microglia; (m) activating migration of one or more cells selected from dendritic cells, bone marrow-derived dendritic cells, macrophages, M1 macrophages, activated M1 macrophages, M2 macrophages, monocytes, osteoclasts, T cells, T helper cells, cytotoxic T cells, granulocytes, neutrophils, microglia, M1 microglia, activated M1 microglia, and M2 microglia; (n) activating one or more functions of one or more cells selected from t dendritic cells, bone marrow-derived dendritic cells, macrophages, M1 macrophages, activated M1 macrophages, M2 macrophages, monocytes, osteoclasts, T cells, T helper cells, cytotoxic T cells, granulocytes, neutrophils, microglia, M1 microglia, activated M1 microglia, and M2 microglia; (o) activating maturation of one or more cells selected from dendritic cells, bone marrow-derived dendritic cells, macrophages, M1 macrophages, activated M1 macrophages, M2 macrophages, monocytes, osteoclasts, T cells, T helper cells, cytotoxic T cells, granulocytes, neutrophils, microglia, M1 microglia, activated M1 microglia, and M2 microglia; (p) activating of one or more types of clearance selected from apoptotic neuron clearance, nerve tissue debris clearance, non-nerve tissue debris clearance, bacteria clearance, other foreign body clearance, disease-causing protein clearance, disease-causing peptide clearance, and tumor cell clearance; optionally wherein the disease-causing protein is selected from amyloid beta, oligomeric amyloid beta, amyloid beta plaques, amyloid precursor protein or fragments thereof, Tau, IAPP, alpha-synuclein, TDP-43, FUS protein, C9orf72 (chromosome 9 open reading frame 72), c9RAN protein, prion protein, PrPSc, huntingtin, calcitonin, superoxide dismutase, ataxin, ataxin 1, ataxin 2, ataxin 3, ataxin 7, ataxin 8, ataxin 10, Lewy body, atrial natriuretic factor, islet amyloid polypeptide, insulin, apolipoprotein AI, serum amyloid A, medin, prolactin, transthyretin, lysozyme, beta 2 microglobulin, gelsolin, keratoepithelin, cystatin, immunoglobulin light chain AL, S-IBM protein, Repeat-associated non-ATG (RAN) translation products, DiPeptide repeat (DPR) peptides, glycine-alanine (GA) repeat peptides, glycine-proline (GP) repeat peptides, glycine-arginine (GR) repeat peptides, proline-alanine (PA) repeat peptides, ubiquitin, and proline-arginine (PR) repeat peptides and the tumor cell is from a cancer selected from bladder cancer, brain cancer, breast cancer, colon cancer, rectal cancer, endometrial cancer, kidney cancer, renal cell cancer, renal pelvis cancer, leukemia, lung cancer, melanoma, non-Hodgkin's lymphoma, pancreatic cancer, prostate cancer, ovarian cancer, fibrosarcoma, and thyroid cancer; (q) inhibition of phagocytosis of one or more of apoptotic neurons, nerve tissue debris, non-nerve tissue debris, bacteria, other foreign bodies, disease-causing proteins, disease-causing peptides, disease-causing nucleic acids, or tumor cells; optionally wherein the disease-causing nucleic acids are antisense GGCCCC (G2C4) repeat-expansion RNA, the disease-causing proteins are selected from amyloid beta, oligomeric amyloid beta, amyloid beta plaques, amyloid precursor protein or fragments thereof, Tau, IAPP, alpha-synuclein, TDP-43, FUS protein, C9orf72 (chromosome 9 open reading frame 72), c9RAN protein, prion protein, PrPSc, huntingtin, calcitonin, superoxide dismutase, ataxin, ataxin 1, ataxin 2, ataxin 3, ataxin 7, ataxin 8, ataxin 10, Lewy body, atrial natriuretic factor, islet amyloid polypeptide, insulin, apolipoprotein AI, serum amyloid A, medin, prolactin, transthyretin, lysozyme, beta 2 microglobulin, gelsolin, keratoepithelin, cystatin, immunoglobulin light chain AL, S-IBM protein, Repeat-associated non-ATG (RAN) translation products, DiPeptide repeat (DPR) peptides, glycine-alanine (GA) repeat peptides, glycine-proline (GP) repeat peptides, glycine-arginine (GR) repeat peptides, proline-alanine (PA) repeat peptides, ubiquitin, and proline-arginine (PR) repeat peptides, and the tumor cells are from a cancer selected from bladder cancer, brain cancer, breast cancer, colon cancer, rectal cancer, endometrial cancer, kidney cancer, renal cell cancer, renal pelvis cancer, leukemia, lung cancer, melanoma, non-Hodgkin's lymphoma, pancreatic cancer, prostate cancer, ovarian cancer, fibrosarcoma, or thyroid cancer; (r) binding to TREM2 ligand on tumor cells; (s) binding to TREM2 ligand on cells selected from neutrophils, dendritic cells, bone marrow-derived dendritic cells, monocytes, microglia, and macrophages; (t) activation of tumor cell killing by one or more of microglia, macrophages, dendritic cells, bone marrow-derived dendritic cells, neutrophils, T cells, T helper cells, or cytotoxic T cells; (u) activating anti-tumor cell proliferation activity of one or more of microglia, macrophages, dendritic cells, bone marrow-derived dendritic cells, neutrophils, T cells, T helper cells, or cytotoxic T cells; (v) activating anti-tumor cell metastasis activity of one or more of microglia, macrophages, dendritic cells, bone marrow-derived dendritic cells, neutrophils, T cells, T helper cells, or cytotoxic T cells; (w) activating of one or more ITAM motif containing receptors, optionally wherein the one or more ITAM motif containing receptors are selected from TREM1, TREM2, FcgR, DAP10, and DAP12; (x) activating of signaling by one or more pattern recognition receptors (PRRs), optionally wherein the one or more PRRs are selected from receptors that identify pathogen-associated molecular patterns (PAMPs), receptors that identify damage-associated molecular patterns (DAMPs), and any combination thereof; (y) activating of one or more receptors comprising the motif D/Ex₀₋₂YxxL/IX₆₋₈YxxL/I (SEQ ID NO: 883); (z) activating of signaling by one or more Toll-like receptors; (aa) activating of the JAK-STAT signaling pathway; (bb) activating of nuclear factor kappa-light-chain-enhancer of activated B cells (NFκB); (cc) phosphorylation of an ITAM motif containing receptor; (dd) modulated expression of one or more inflammatory receptors, optionally wherein the one or more inflammatory receptors comprise CD86 and the one or more inflammatory receptors are expressed on one or more of microglia, macrophages, dendritic cells, bone marrow-derived dendritic cells, neutrophils, T cells, T helper cells, or cytotoxic T cells; (ee) increasing expression of one or more TREM2-dependent genes; (gg) normalization of disrupted TREM2-dependent gene expression; (ff) increasing expression of one or more ITAM-dependent genes, optionally wherein the one more ITAM-dependent genes are activated by nuclear factor of activated T cells (NFAT) transcription factors; (gg) inhibiting differentiation of one or more of immunosuppressor dendritic cells, immunosuppressor macrophages, myeloid derived suppressor cells, tumor-associated macrophages, immunosuppressor neutrophils, and regulatory T cells; (hh) inhibiting functionality of one or more of immunosuppressor dendritic cells, immunosuppressor macrophages, myeloid-derived suppressor cells, tumor-associated macrophages, immunosuppressor neutrophils, and regulatory T cells; (ii) decreasing infiltration of one or more of immunosuppressor dendritic cells, immunosuppressor macrophages, myeloid derived suppressor cells, tumor-associated macrophages, immunosuppressor neutrophils, and regulatory T cells into tumors; (jj) decreasing number of tumor-promoting myeloid/granulocytic immune-suppressive cells in a tumor, in peripheral blood, or other lymphoid organ; (kk) inhibiting tumor-promoting activity of myeloid-derived suppressor cells; (11) decreasing expression of tumor-promoting cytokines in a tumor or in peripheral blood, optionally wherein the tumor-promoting cytokines are TGF-beta or IL-10; (mm) decreasing tumor infiltration of tumor-promoting FoxP3+ regulatory T lymphocytes; (nn) increasing activation of tumor-specific T lymphocytes with tumor killing potential; (oo) decreasing tumor volume; (pp) decreasing tumor growth rate; (qq) increasing efficacy of one or more immune-therapies that modulate anti-tumor T cell responses, optionally wherein the one or more immune-therapies are selected from f PD1/PDL1 blockade, CTLA-4 blockade, and cancer vaccines; (rr) inhibition of PLCγ/PKC/calcium mobilization; and (uu) inhibition of PI3K/Akt, Ras/MAPK signaling. (ss) increasing phagocytosis by dendritic cells, macrophages, monocytes, and/or microglia (tt) induction or retention of TREM2 clustering on a cell surface; (xx) TREM2 binding to DAP12; (uu) TREM2 phosphorylation; (vv) DAP12 phosphorylation; (ww) TREM2 phosphorylation; (xx) activation of one or more SRC family tyrosine kinases including Syk kinase; (yy) increasing memory; and (zz) reducing cognitive deficit.

[0174] Anti-TREM2 antibodies of the present disclosure can be used to prevent, reduce risk of, or treat dementia, frontotemporal dementia, Alzheimer's disease, vascular dementia, mixed dementia, Creutzfeldt-Jakob disease, normal pressure hydrocephalus, amyotrophic lateral sclerosis, Huntington's disease, tauopathy disease, Nasu-Hakola disease, stroke, acute trauma, chronic trauma, cognitive deficit, memory loss, lupus, acute and chronic colitis, rheumatoid arthritis, wound healing, Crohn's disease, inflammatory bowel disease, ulcerative colitis, obesity, malaria, essential tremor, central nervous system lupus, Behcet's disease, Parkinson's disease, dementia with Lewy bodies, multiple system atrophy, Shy-Drager syndrome, progressive supranuclear palsy, cortical basal ganglionic degeneration, acute disseminated encephalomyelitis, granulomartous disorders, sarcoidosis, diseases of aging, seizures, spinal cord injury, traumatic brain injury, age related macular degeneration, glaucoma, retinitis pigmentosa, retinal degeneration, respiratory tract infection, sepsis, eye infection, systemic infection, lupus, arthritis, multiple sclerosis, low bone density, osteoporosis, osteogenesis, osteopetrotic disease, Paget's disease of bone, solid and blood cancer, bladder cancer, brain cancer, breast cancer, colon cancer, rectal cancer, endometrial cancer, kidney cancer, renal cell cancer, renal pelvis cancer, leukemia, lung cancer, melanoma, non-Hodgkin's lymphoma, pancreatic cancer, prostate cancer, ovarian cancer, fibrosarcoma, acute lymphoblastic leukemia (ALL), acute myeloid leukemia (AML), chronic lymphocytic leukemia (CLL), chronic myeloid leukemia (CML), multiple myeloma, polycythemia vera, essential thrombocytosis, primary or idiopathic myelofibrosis, primary or idiopathic myelosclerosis, myeloid-derived tumors, tumors that express TREM2, thyroid cancer, infections, CNS herpes, parasitic infections, Trypanosome infection, Cruzi infection, Pseudomonas aeruginosa infection, Leishmania donovani infection, group B Streptococcus infection, Campylobacter jejuni infection, Neisseria meningiditis infection, type I HIV, and Haemophilus influenza. The methods provided herein also find use in inducing or promoting the survival, maturation, functionality, migration, or proliferation of one or more immune cells in an individual in need thereof. The methods provided herein find further use in decreasing the activity, functionality, or survival of regulatory T cells, tumor-imbedded immunosuppressor dendritic cells, tumor-imbedded immunosuppressor macrophages, myeloid-derived suppressor cells, tumor-associated macrophages, acute myeloid leukemia (AML) cells, chronic lymphocytic leukemia (CLL) cell, or chronic myeloid leukemia (CML) cell in an individual in need thereof. The methods provided herein find further use in increasing memory and/or reducing cognitive deficit.

[0175] The anti-TREM2 antibodies of the present disclosure may also be used in advanced wound care. In some embodiments, the anti-TREM2 antibodies of the present disclosure are monoclonal antibodies. Anti-TREM2 antibodies of the present disclosure may be tested for inducing one or more TREM2 activities (a) modulated expression of one or more anti-inflammatory cytokines, optionally wherein the one or more anti-inflammatory cytokines are selected from IL-4, IL-10 TGF-β, IL-13, IL-35 IL-16, IFN-alpha, IL-1Ra, VEGF, G-CSF, YM, AXL, FLT1 and soluble receptors for TNF or IL-6; (b) modulated expression of one or more anti-inflammatory cytokines in one or more cells selected from macrophages, dendritic cells, bone marrow-derived dendritic cells, monocytes, osteoclasts, and microglial cells; (c) modulated expression of one or more pro-inflammatory cytokines, optionally wherein the one or more pro-inflammatory cytokines are selected from IFN-β, IL-1α, IL-1β, TNF-α, YM-1, CD86, CCL2, CCL3, CCL5, CCR2, Gata3, Rorc, IL-6, IL-8, CRP, IL-20 family members, IL-33, LIF, IFN-gamma, OSM, CNTF, GM-CSF, IL-11, IL-12, IL-17, IL-18, IL-23, CXCL10, CCL4, FLT1, CSF-1, OPN, MHC-II, CD11c, AXL and MCP-1; (d) modulated expression of one or more pro-inflammatory cytokines in one or more cells selected from macrophages, dendritic cells, bone marrow-derived dendritic cells, monocytes, osteoclasts, and microglial cells; (e) activation of extracellular signal-regulated kinase (ERK) phosphorylation; (f) activating tyrosine phosphorylation on multiple cellular proteins; (g) modulated expression of C-C chemokine receptor 7 (CCR7); (h) activation of microglial cell chemotaxis toward CCL19 and CCL21 expressing cells; (i) increasing priming or modulating function of T cells, such as CD8+ T cells, CD4+ T cells, and/or regulatory T cells, induced by one or more cells selected from dendritic cells, bone marrow-derived dendritic cells, monocytes, microglia, M1 microglia, activated M1 microglia, M2 microglia, macrophages, M1 macrophages, activated M1 macrophages, and M2 macrophages; (j) activation of osteoclast production, increased rate of rate of osteoclastogenesis, or both; (k) increased survival of one or more cells selected from dendritic cells, bone marrow-derived dendritic cells, macrophages, M1 macrophages, activated M1 macrophages, M2 macrophages, monocytes, osteoclasts, T cells, T helper cells, cytotoxic T cells, granulocytes, neutrophils, microglia, M1 microglia, activated M1 microglia, and M2 microglia; (1) increased proliferation of one or more cells selected from dendritic cells, bone marrow-derived dendritic cells, macrophages, M1 macrophages, activated M1 macrophages, M2 macrophages, monocytes, osteoclasts, T cells, T helper cells, cytotoxic T cells, granulocytes, neutrophils, microglia, M1 microglia, activated M1 microglia, and M2 microglia; (m) activating migration of one or more cells selected from dendritic cells, bone marrow-derived dendritic cells, macrophages, M1 macrophages, activated M1 macrophages, M2 macrophages, monocytes, osteoclasts, T cells, T helper cells, cytotoxic T cells, granulocytes, neutrophils, microglia, M1 microglia, activated M1 microglia, and M2 microglia; (n) activating one or more functions of one or more cells selected from dendritic cells, bone marrow-derived dendritic cells, macrophages, M1 macrophages, activated M1 macrophages, M2 macrophages, monocytes, osteoclasts, T cells, T helper cells, cytotoxic T cells, granulocytes, neutrophils, microglia, M1 microglia, activated M1 microglia, and M2 microglia; (o) activating maturation of one or more cells selected from dendritic cells, bone marrow-derived dendritic cells, macrophages, M1 macrophages, activated M1 macrophages, M2 macrophages, monocytes, osteoclasts, T cells, T helper cells, cytotoxic T cells, granulocytes, neutrophils, microglia, M1 microglia, activated M1 microglia, and M2 microglia; (p) activating of one or more types of clearance selected from apoptotic neuron clearance, nerve tissue debris clearance, non-nerve tissue debris clearance, bacteria clearance, other foreign body clearance, disease-causing protein clearance, disease-causing peptide clearance, and tumor cell clearance; optionally wherein the disease-causing protein is selected from amyloid beta, oligomeric amyloid beta, amyloid beta plaques, amyloid precursor protein or fragments thereof, Tau, IAPP, alpha-synuclein, TDP-43, FUS protein, C9orf72 (chromosome 9 open reading frame 72), c9RAN protein, prion protein, PrPSc, huntingtin, calcitonin, superoxide dismutase, ataxin, ataxin 1, ataxin 2, ataxin 3, ataxin 7, ataxin 8, ataxin 10, Lewy body, atrial natriuretic factor, islet amyloid polypeptide, insulin, apolipoprotein AI, serum amyloid A, medin, prolactin, transthyretin, lysozyme, beta 2 microglobulin, gelsolin, keratoepithelin, cystatin, immunoglobulin light chain AL, S-IBM protein, Repeat-associated non-ATG (RAN) translation products, DiPeptide repeat (DPR) peptides, glycine-alanine (GA) repeat peptides, glycine-proline (GP) repeat peptides, glycine-arginine (GR) repeat peptides, proline-alanine (PA) repeat peptides, ubiquitin, and proline-arginine (PR) repeat peptides and the tumor cell is from a cancer selected from bladder cancer, brain cancer, breast cancer, colon cancer, rectal cancer, endometrial cancer, kidney cancer, renal cell cancer, renal pelvis cancer, leukemia, lung cancer, melanoma, non-Hodgkin's lymphoma, pancreatic cancer, prostate cancer, ovarian cancer, fibrosarcoma, and thyroid cancer; (u) activation of phagocytosis of one or more of apoptotic neurons, nerve tissue debris, non-nerve tissue debris, bacteria, other foreign bodies, disease-causing proteins, disease-causing peptides, disease-causing nucleic acids, or tumor cells; optionally wherein the disease-causing nucleic acids are antisense GGCCCC (G2C4) repeat-expansion RNA, the disease-causing proteins are selected from amyloid beta, oligomeric amyloid beta, amyloid beta plaques, amyloid precursor protein or fragments thereof, Tau, IAPP, alpha-synuclein, TDP-43, FUS protein, C9orf72 (chromosome 9 open reading frame 72), c9RAN protein, prion protein, PrPSc, huntingtin, calcitonin, superoxide dismutase, ataxin, ataxin 1, ataxin 2, ataxin 3, ataxin 7, ataxin 8, ataxin 10, Lewy body, atrial natriuretic factor, islet amyloid polypeptide, insulin, apolipoprotein AI, serum amyloid A, medin, prolactin, transthyretin, lysozyme, beta 2 microglobulin, gelsolin, keratoepithelin, cystatin, immunoglobulin light chain AL, S-IBM protein, Repeat-associated non-ATG (RAN) translation products, DiPeptide repeat (DPR) peptides, glycine-alanine (GA) repeat peptides, glycine-proline (GP) repeat peptides, glycine-arginine (GR) repeat peptides, proline-alanine (PA) repeat peptides, ubiquitin, and proline-arginine (PR) repeat peptides, and the tumor cells are from a cancer selected from bladder cancer, brain cancer, breast cancer, colon cancer, rectal cancer, endometrial cancer, kidney cancer, renal cell cancer, renal pelvis cancer, leukemia, lung cancer, melanoma, non-Hodgkin's lymphoma, pancreatic cancer, prostate cancer, ovarian cancer, fibrosarcoma, or thyroid cancer; (p) binding to TREM2 ligand on tumor cells; (q) binding to TREM2 ligand on cells selected from neutrophils, dendritic cells, bone marrow-derived dendritic cells, monocytes, microglia, and macrophages; (r) activation of tumor cell killing by one or more of microglia, macrophages, dendritic cells, bone marrow-derived dendritic cells, neutrophils, T cells, T helper cells, or cytotoxic T cells; (s) activating anti-tumor cell proliferation activity of one or more of microglia, macrophages, dendritic cells, bone marrow-derived dendritic cells, neutrophils, T cells, T helper cells, or cytotoxic T cells; (t) activating anti-tumor cell metastasis activity of one or more of microglia, macrophages, dendritic cells, bone marrow-derived dendritic cells, neutrophils, T cells, T helper cells, or cytotoxic T cells; (y) activating of one or more ITAM motif containing receptors, optionally wherein the one or more ITAM motif containing receptors are selected from TREM1, TREM2, FcgR, DAP10, and DAP12; (z) activating of signaling by one or more pattern recognition receptors (PRRs), optionally wherein the one or more PRRs are selected from receptors that identify pathogen-associated molecular patterns (PAMPs), receptors that identify damage-associated molecular patterns (DAMPs), and any combination thereof; (aa) activating of one or more receptors comprising the motif D/Ex₀₋₂YxxL/IX₆₋₈YxxL/I (SEQ ID NO: 883); (bb) activating of signaling by one or more Toll-like receptors; (cc) activating of the JAK-STAT signaling pathway; (dd) activating of nuclear factor kappa-light-chain-enhancer of activated B cells (NFκB); (dd) phosphorylation of an ITAM motif containing receptor; (ee) modulated expression of one or more inflammatory receptors, optionally wherein the one or more inflammatory receptors comprise CD86 and the one or more inflammatory receptors are expressed on one or more of microglia, macrophages, dendritic cells, bone marrow-derived dendritic cells, neutrophils, T cells, T helper cells, or cytotoxic T cells; (ff) increasing expression of one or more TREM2-dependent genes; (gg) normalization of disrupted TREM2-dependent gene expression; (hh) increasing expression of one or more ITAM-dependent genes, optionally wherein the one more ITAM-dependent genes are activated by nuclear factor of activated T cells (NFAT) transcription factors; (ii) inhibiting differentiation of one or more of immunosuppressor dendritic cells, immunosuppressor macrophages, myeloid derived suppressor cells, tumor-associated macrophages, immunosuppressor neutrophils, and regulatory T cells; (jj) inhibiting functionality of one or more of immunosuppressor dendritic cells, immunosuppressor macrophages, myeloid-derived suppressor cells, tumor-associated macrophages, immunosuppressor neutrophils, and regulatory T cells; (nn) decreasing infiltration of one or more of immunosuppressor dendritic cells, immunosuppressor macrophages, myeloid derived suppressor cells, tumor-associated macrophages, immunosuppressor neutrophils, and regulatory T cells into tumors; (kk) decreasing number of tumor-promoting myeloid/granulocytic immune-suppressive cells in a tumor, in peripheral blood, or other lymphoid organ; (11) inhibiting tumor-promoting activity of myeloid-derived suppressor cells; (mm) decreasing expression of tumor-promoting cytokines in a tumor or in peripheral blood, optionally wherein the tumor-promoting cytokines are TGF-beta or IL-10; (nn) decreasing tumor infiltration of tumor-promoting FoxP3+ regulatory T lymphocytes; (oo) increasing activation of tumor-specific T lymphocytes with tumor killing potential; (pp) decreasing tumor volume; (qq) decreasing tumor growth rate; (rr) increasing efficacy of one or more immune-therapies that modulate anti-tumor T cell responses, optionally wherein the one or more immune-therapies are selected from PD1/PDL1 blockade, CTLA-4 blockade, and cancer vaccines; (ww) inhibition of PLCy/PKC/calcium mobilization; and (xx) inhibition of PI3K/Akt, Ras/MAPK signaling. (xx) increasing phagocytosis by dendritic cells, macrophages, monocytes, and/or microglia (yy) induction or retention of TREM2 clustering on a cell surface; (zz) TREM2 binding to DAP12; (aaa) TREM2 phosphorylation; (bbb) DAP12 phosphorylation; (ccc) TREM2 autophosphorylation; (ddd) activation of one or more SRC family tyrosine kinases including Syk kinase; (eee) modulating expression of one or more proteins selected from the group consisting of C1qa, C1qB, C1qC, C1s, C1R, C4, C2, C3, ITGB2, HMOX1, LAT2. CASP1, CSTA, VSIG4, MS4A4A, C3AR1, GPX1, TyroBP, ALOXSAP, ITGAM, SLC7A7, CD4, ITGAX, PYCARD, and VEGF; (fff) increasing memory; and (ggg) reducing cognitive deficit. Useful assays may include western blots (e.g., for tyrosine-phosphorylated DAP12 or threonine/serine-phosphorylated PI3K-kinase substrates), ELISA (e.g., for secreted interleukin or cytokine secretion), FACS (e.g., for anti-TREM2 binding to TREM2), immunocytochemistry (e.g., for e.g., for tyrosine-phosphorylated DAP12 or threonine/serine-phosphorylated PI3K-kinase substrates), reporter-gene assays (e.g., for TLR activation), increased survival and/or function of dendritic cells, macrophages, monocytes, osteoclasts, Langerhans cells of skin, Kupffer cells, and/or microglia, increased phagocytosis of apoptotic neurons, damaged synapses, amyloid beta or fragments thereof, Tau, IAPP, alpha-synuclein, TDP-43, FUS protein, prion protein, PrPSc, huntingtin, calcitonin, superoxide dismutase, ataxin, Lewy body, atrial natriuretic factor, islet amyloid polypeptide, insulin, apolipoprotein AI, serum amyloid A, medin, prolactin, transthyretin, lysozyme, beta 2 microglobulin, gelsolin, keratoepithelin, cystatin, immunoglobulin light chain AL, S-IBM protein, Repeat-associated non-ATG (RAN) translation products, DiPeptide repeat (DPR) peptides, glycine-alanine (GA) repeat peptides, glycine-proline (GP) repeat peptides, glycine-arginine (GR) repeat peptides, proline-alanine (PA) repeat peptides, and proline-arginine (PR) repeat peptides, nerve tissue debris, non-nerve tissue debris, bacteria, other foreign bodies, disease-causing proteins, disease-causing peptides, disease-causing nucleic acid, or tumor cells by macrophages, dendritic cells, Langerhans cells of skin, Kupffer cells, monocytes, osteoclasts, and/or microglial cells, increased cytoskeleton reorganization, and decreased microglial pro-inflammatory responses, or other assays known in the art.

[0176] An antibody dependent on binding to FcgR receptor to activate targeted receptors may lose its agonist activity if engineered to eliminate FcgR binding (see, e.g., Wilson et al., (2011) Cancer Cell 19, 101-113; Armour at al., (2003) Immunology 40 (2003) 585-593); and White et al., (2015) Cancer Cell 27, 138-148). As such, it is thought that an anti-TREM2 antibody of the present disclosure with the correct epitope specificity can be an agonist antibody and activate the target antigen, with minimal adverse effects, when the antibody has an Fc domain from a human IgG2 isotype (CH1 and hinge region) or another type of Fc domain that is capable of preferentially binding the inhibitory FcgRIIB r receptors, or a variation thereof.

[0177] Exemplary agonist antibody Fc isotypes and modifications are provided in Table A below. In some embodiments, the agonist antibody has an Fc isotype listed in Table A below.

TABLE A
Exemplary anti-TREM2 antibody Fc isotypes that are
capable of binding Fc gamma receptor

| Fc Isotype | Mutation (EU numbering scheme) |
|---|---|
| IgG1 | N297A |
| IgG1 | D265A and N297A |
| IgG1 | D270A |
| IgG1 | L234A and L235A |
| | L234A and G237A |
| | L234A and L235A and G237A |
| IgG1 | P238D and/or L328E and/or S267E/L328F and/or E233 and |
| | or/G237D and/or H268D and/or P271G and/or A330R |
| IgG1 | P238D and L328E and E233D and G237D and H268D and |
| | P271G and A330R |
| IgG1 | P238D and L328E and G237D and H268D and P271G and |
| | A330R |
| IgG1 | P238D and S267E and L328F and E233D and G237D and |
| | H268D and P271G and A330R |
| IgG1 | P238D and S267E and L328F and G237D and H268D and |
| | P271G and A330R |
| IgG2 | V234A and G237A |
| IgG4 | L235A and G237A and E318A |
| IgG4 | S228P and L236E |
| IgG2/4 | IgG2 aa 118 to 260 and IgG4 aa 261 to 447 |
| hybrid | H268Q and V309L; and A330S and P331S |
| IgG1 | C226S and C229S and E233P and L234V and L235A |
| IgG1 | L234F and L235E and P331S |
| IgG2 | C232S or C233S |
| IgG2 | A330S and P331S |
| IgG1 | S267E, and L328F |
| | S267E alone |
| IgG2 | S267E and L328F |
| IgG4 | S267E and L328F |
| IgG2 | WT HC with Kappa (light chain) LC |
| | HC C127S with Kappa LC |
| | Kappa LC C214S |
| | Kappa LC C214S and HC C233S |
| | Kappa LC C214S and HC C232S |
| | Any of the above listed mutations together with P330S and |
| | P331S mutations |
| | F(ab′)2 fragment of WT IgG1 and any of the above listed |
| | mutations |
| IgG1 | Substitute the Constant Heavy 1 (CH1) and hinge region of |
| | IgG1 With CH1 and hinge region of IGg2 |
| | ASTKGPSVFP LAPCSRSTSE STAALGCLVK |
| | DYFPEPVTVS WNSGALTSGV HTFPAVLQSS |
| | GLYSLSSVVT VPSSNFGTQT YTCNVDHKPS |
| | NTKVDKTVER KCCVECPPCP (SEQ ID NO: 886) |
| | With a Kappa LC |
| IgG1 | Any of the above listed mutations together with A330L and/ |
| | or L234F and/or L235E and/or P331S |
| IgG1, IgG2, | Any of the above listed mutations together with M252Y |
| or IgG4 | and/or S254T and/or T256E |
| Mouse IgG1 | For mouse disease models |
| IgG4 | WT |

[0178] In addition to the isotypes described in Table A, and without wishing to be bound to theory, it is thought that antibodies with human IgG1 or IgG3 isotypes and mutants thereof (e.g. Strohl (2009) Current Opinion in Biotechnology 2009, 20:685-691) that bind the activating Fcg Receptors I, HA, IIC, MA, BIB in human and/or Fcg Receptors I, III and IV in mouse, may also act as agonist antibodies in vivo but may be associated with adverse effects related to ADCC. However, such Fcg receptors appear to be less available for antibody binding in vivo, as compared to the Inhibitory Fcg receptor FcgRIIB (see, e.g., White, et al., (2013) Cancer Immunol. Immunother. 62, 941-948; and Li et al., (2011) Science 333(6045):1030-1034.).

[0179] In some embodiments, the agonist antibody is of the IgG class, the IgM class, or the IgA class. In some embodiments, the agonist antibody has an IgG1, IgG2, IgG3, or IgG4 isotype.

[0180] In certain embodiments, the agonist antibody has an IgG2 isotype. In some embodiments, the agonist antibody contains a human IgG2 constant region. In some embodiments, the human IgG2 constant region includes an Fc region. In some embodiments, the agonist antibody induces the one or more TREM2 activities, the DAP12 activities, or both independently of binding to an Fc receptor. In some embodiments, the agonist antibody binds an inhibitory Fc receptor. In certain embodiments, the inhibitory Fc receptor is inhibitory Fc-gamma receptor IIB (FcγIIB). In some embodiments, the Fc region contains one or more modifications. For example, in some embodiments, the Fc region contains one or more amino acid substitutions (e.g., relative to a wild-type Fc region of the same isotype). In some embodiments, the one or more amino acid substitutions are selected from V234A (Alegre et al., (1994) Transplantation 57:1537-1543. 31; Xu et al., (2000) Cell Immunol, 200:16-26), G237A (Cole et al. (1999) Transplantation, 68:563-571), H268Q, V309L, A330S, P331S (US 2007/0148167; Armour et al. (1999) Eur J Immunol 29: 2613-2624; Armour et al. (2000) The Haematology Journal 1(Supp1.1):27; Armour et al. (2000) The Haematology Journal 1(Supp1.1):27), C232S, and/or C233S (White et al. (2015) Cancer Cell 27, 138-148), S267E, L328F (Chu et al., (2008) Mol Immunol, 45:3926-3933), M252Y, S254T, and/or T256E, where the amino acid position is according to the EU or, Kabat numbering convention.

[0181] In some embodiments, the agonist antibody has an IgG2 isotype with a heavy chain constant domain that contains a C127S amino acid substitution, where the amino acid position is according to the EU or, Kabat numbering convention (White et al., (2015) Cancer Cell 27, 138-148; Lightle et al., (2010) PROTEIN SCIENCE 19:753-762; and WO2008079246).

[0182] In some embodiments, the agonist antibody has an IgG2 isotype with a Kappa light chain constant domain that contains a C214S amino acid substitution, where the amino acid position is according to the EU or, Kabat numbering convention (White et al., (2015) Cancer Cell 27, 138-148; Lightle et al., (2010) PROTEIN SCIENCE 19:753-762; and WO2008079246).

[0183] In certain embodiments, the agonist antibody has an IgG1 isotype. In some embodiments, the agonist antibody contains a mouse IgG1 constant region. In some embodiments, the agonist antibody contains a human IgG1 constant region. In some embodiments, the human IgG1 constant region includes an Fc region. In some embodiments, the agonist antibody binds an inhibitory Fc receptor. In certain embodiments, the inhibitory Fc receptor is inhibitory Fc-gamma receptor IIB (FcγIIB). In some embodiments, the Fc region contains one or more modifications. For example, in some embodiments, the Fc region contains one or more amino acid substitutions (e.g., relative to a wild-type Fc region of the same isotype). In some embodiments, the one or more amino acid substitutions are selected from N297A (Bolt S et al. (1993) Eur J Immunol 23:403-411), D265A (Shields et al. (2001) R. J. Biol. Chem. 276, 6591-6604), L234A, L235A (Hutchins et al. (1995) Proc Natl Acad Sci USA, 92:11980-11984; Alegre et al., (1994) Transplantation 57:1537-1543. 31; Xu et al., (2000) Cell Immunol, 200:16-26), G237A (Alegre et al. (1994) Transplantation 57:1537-1543. 31; Xu et al. (2000) Cell Immunol, 200:16-26), C226S, C229S, E233P, L234V, L234F, L235E (McEarchern et al., (2007) Blood, 109:1185-1192), P331S (Sazinsky et al., (2008) Proc Natl Acad Sci USA 2008, 105:20167-20172), S267E, L328F, A330L, M252Y, S254T, and/or T256E, where the amino acid position is according to the EU or, Kabat numbering convention.

[0184] In some embodiments, the antibody includes an IgG2 isotype heavy chain constant domain 1(CH1) and hinge region (White et al., (2015) Cancer Cell 27, 138-148). In certain embodiments, the IgG2 isotype CH1 and hinge region contain the amino acid sequence of ASTKGPSVFPLAPCSRSTSESTAALGCLVKDYFPEPVTVSWNSGALTSGVHTFPAVLQSSGLY SLSSVVTVPSSNFGTQTYTCNVDHKPSNTKVDKTVERKCCVECPPCP (SEQ ID NO: 886). In some embodiments, the antibody Fc region contains a S267E amino acid substitution, a L328F amino acid substitution, or both, and/or a N297A or N297Q amino acid substitution, where the amino acid position is according to the EU or, Kabat numbering convention.

[0185] In certain embodiments, the agonist antibody has an IgG4 isotype. In some embodiments, the agonist antibody contains a human IgG4 constant region. In some embodiments, the human IgG4 constant region includes an Fc region. In some embodiments, the agonist antibody binds an inhibitory Fc receptor. In certain embodiments, the inhibitory Fc receptor is inhibitory Fc-gamma receptor IIB (FcγIIB). In some embodiments, the Fc region contains one or more modifications. For example, in some embodiments, the Fc region contains one or more amino acid substitutions (e.g., relative to a wild-type Fc region of the same isotype). In some embodiments, the one or more amino acid substitutions are selected from L235A, G237A, S228P, L236E (Reddy et al., (2000) J Immunol, 164:1925-1933), S267E, E318A, L328F, M252Y, S254T, and/or T256E, where the amino acid position is according to the EU or, Kabat numbering convention.

[0186] In certain embodiments, the agonist antibody has a hybrid IgG2/4 isotype. In some embodiments, the agonist antibody includes an amino acid sequence containing amino acids 118 to 260 according to EU or, Kabat numbering of human IgG2 and amino acids 261-447 according to EU or, Kabat numbering of human IgG4 (WO 1997/11971; WO 2007/106585).

[0187] In certain embodiments, the antibody contains a mouse IgG4 constant region (Bartholomaeus, et al. (2014). J. Immunol. 192, 2091-2098).

[0188] In some embodiments, the Fc region further contains one or more additional amino acid substitutions selected from A330L, L234F; L235E, or P331S according to EU or, Kabat numbering; and any combination thereof.

[0189] Inert Antibodies

[0190] Another class of antibodies of the present disclosure includes inert antibodies. As used herein, “inert” antibodies refer to antibodies that specifically bind their target antigen but do not modulate (e.g., decrease/inhibit or activate/induce) antigen function. For example, in the case of TREM2, inert antibodies do not modulate ligand binding and/or TREM2 activities. Without wishing to be bound to theory, it is thought that antibodies that do not have the ability to cluster TREM2 on the cell surface may be inert antibodies even if they have an epitope specificity that is compatible with receptor activation.

[0191] In some embodiments, antibodies that bind a TREM2 protein may include antibodies that bind TREM2 but, due to their epitope specificity, do not modulate protein function. Such functionally inert antibodies can be used as cargo to transport toxins or to tumor cells as described for the CD33 antibody Gemtuzumab zogamicin, (marketed as Mylotarg) which is conjugated to the cytotoxic agent from the class of calicheamicins and is used to target and kill acute myelogenous leukemia tumors (Naito et al., (2000), Leukemia, 14, 1436-1443; Ricart (2011) Clin Cancer Res 17; 6417-6436; Hamann et al., (2002) Journal: Bioconjugate Chemistry, 13, 47-58; and Beitz et al., (2001) Clin Cancer Res 7; 1490-6.). Therefore, in some embodiments, antibodies of the present disclosure are inert antibodies that bind TREM2 but are incapable of inducing one or more TREM2 activities (e.g., a TREM2 activity described herein).

[0192] Exemplary inert antibody Fc isotypes and modifications are provided in Table B below. In some embodiments, the inert antibody has an Fc isotype listed in Table B below.

[0193] Antagonist Antibodies

[0194] A third class of antibodies of the present disclosure includes antagonist antibodies. In some embodiments, antibodies that bind a TREM2 protein may include antagonist antibodies that bind TREM2 and inhibit one or more TREM2 activities, either by preventing interaction between TREM2 and one or more TREM2 ligands, or by preventing the transduction of signal from the extracellular domain of TREM2 into the cell cytoplasm in the presence of ligand. In some embodiments, antagonist antibodies of the present disclosure may have the epitope specificity of an agonist antibody of the present disclosure, but have an Fc domain that is not capable of binding Fcg receptors and thus is unable to, for example, cluster the TREM2 receptor.

[0195] In some embodiments, an antibody of the present disclosure is an antagonist antibody. In some embodiments, the antagonist antibody inhibits one or more TREM2 activities. In some embodiments, the antagonist antibody decreases activity of one or more TREM2-dependent genes. In some embodiments, the anti-TREM2 antibody decreases levels of TREM2 in one or more cells (e.g., cell surface levels, intracellular levels, or total levels). In some embodiments, the anti-TREM2 antibody induces degradation of TREM2. In some embodiments, the anti-TREM2 antibody induces cleavage of TREM2. In some embodiments, the anti-TREM2 antibody induces internalization of TREM2. In some embodiments, the anti-TREM2 antibody induces shedding of TREM2. In some embodiments, the anti-TREM2 antibody induces downregulation of TREM2 expression. In some embodiments, the anti-TREM2 antibody inhibits interaction (e.g., binding) between TREM2 and one or more TREM2 ligands. In some embodiments, the anti-TREM2 antibody transiently activates and then induces degradation of TREM2. In some embodiments, the anti-TREM2 antibody transiently activates and then induces cleavage of TREM2. In some embodiments, the anti-TREM2 antibody transiently activates and then induces internalization of TREM2. In some embodiments, the anti-TREM2 antibody transiently activates and then induces shedding of TREM2. In some embodiments, the anti-TREM2 antibody transiently activates and then induces downregulation of TREM2 expression. In some embodiments, the anti-TREM2 antibody transiently activates and then induces decreased expression of TREM2. In certain embodiments, the individual has a TREM2 variant allele. In some embodiments, the anti-TREM2 antibody acts in solution.

[0196] In some embodiments, the one or more TREM2-dependent genes include, without limitation, one or more nuclear factor of activated T-cells (NFAT) transcription factors. In some embodiments, the antagonist antibody decreases the survival of macrophages, microglial cells, M1 macrophages, M1 microglial cells, M2 macrophages, M2 microglial cells, osteoclasts, Langerhans cells of skin, Kupffer cells, and/or dendritic cells. In some embodiments, the antagonist antibody inhibits interaction between TREM2 and one or more TREM2 ligands. In some embodiments, the antagonist antibody inhibits TREM2 signal transduction. In some embodiments, the antagonist antibody inhibits interaction between TREM2 and one or more TREM2 ligands and inhibits TREM2 signal transduction. In some embodiments, the antagonist antibody inhibits TREM2 interaction with DAP12.

[0197] Levels of TREM2 in one or more cells (e.g., cellular levels) may refer to, without limitation, cell surface levels of TREM2, intracellular levels of TREM2, and total levels of TREM2. In some embodiments, a decrease in cellular levels of TREM2 comprises decrease in cell surface levels of TREM2. As used herein, cell surface levels of TREM2 may be measured by any in vitro cell-based assays or suitable in vivo model described herein or known in the art, for example, utilizing flow cytometry, such as fluorescence-activated cell sorting (FACS), to measure cell surface levels of TREM2. In some embodiments, a decrease in levels of TREM2 in cells comprises a decrease in intracellular levels of TREM2. As used herein intracellular levels of TREM2 may be measured by any in vitro cell-based assays or suitable in vivo model described herein or known in the art, for example immunostaining, Western blot analysis, co-immunoprecipitation, and cell cytometry. In some embodiments, a decrease in cellular levels of TREM2 comprises a decrease in total levels of TREM2. As used herein, total levels of TREM2 may be measured by any in vitro cell-based assays or suitable in vivo model described herein or known in the art, for example immunostaining, Western blot analysis, co-immunoprecipitation, and cell cytometry. In some embodiments, the anti-TREM2 antibodies induce TREM2 degradation, TREM2 cleavage, TREM2 internalization, TREM2 shedding, and/or downregulation of TREM2 expression. In some embodiments, levels of TREM2 in one or more cells (e.g., cellular levels) are measured on primary cells (e.g., dendritic cells, bone marrow-derived dendritic cells, monocytes, microglia, and macrophages) or on cell lines utilizing an in vitro cell assay. In some embodiments, anti-TREM2 antibodies of the present disclosure decrease cellular levels of TREM2 by at least 15%, at least 20%, at least 25%, at least 30%, at least 35%, at least 40%, at least 45%, at least 50%, at least 55%, at least 60%, at least 65%, at least 70%, at least 75%, at least 80%, at least 85%, at least 90%, at least 95%, at least 96%, at least 97%, at least 98%, at least 99%, or more as compared to cellular levels of TREM2 in the absence of the anti-TREM2 antibody. Any in vitro cell-based assays or suitable in vivo model described herein or known in the art may be used to measure inhibition of interaction (e.g., binding) between TREM2 and one or more TREM2 ligands. In some embodiments, anti-TREM2 antibodies of the present disclosure inhibit interaction (e.g., binding) between TREM2 and one or more TREM2 ligands by a at least 15%, at least 20%, at least 25%, at least 30%, at least 35%, at least 40%, at least 45%, at least 50%, at least 55%, at least 60%, at least 65%, at least 70%, at least 75%, at least 80%, at least 85%, at least 90%, at least 95%, at least 96%, at least 97%, at least 98%, at least 99%, or more at saturating antibody concentrations utilizing any in vitro assay or cell-based culture assay described herein or known in the art.

[0198] In some embodiments, antibody cross-linking is required for agonist antibody function. Antibody cross-linking can occur through binding to a secondary antibody in vitro or through binding to Fc receptors in vivo. For example, antagonistic antibodies can be converted to agonistic antibodies via biotin/streptavidin cross-linking or secondary antibody binding in vitro (see for example Gravestein et al., (1996) J. Exp. Med. 184:675-685; Gravestein et al., (1994) International Immunol. 7:551-557). Agonistic antibodies may exert their activity by mimicking the biological activity of the receptor ligand or by enhancing receptor aggregation, thereby activating receptor signaling. In some embodiments, the absence of antibody cross-linking is required for antagonistic activity. In some embodiments, the antibody will act as antagonistic when presented as monomer and as an agonist when presented as a dimer or a multimer. Antagonistic antibodies may exert their activity by blocking receptor-ligand interactions.

[0199] Exemplary antagonist antibody Fc isotypes and modifications are provided in Table B below. In some embodiments, the antagonist antibody has an Fc isotype listed in Table B below.

[0200] Exemplary Fc Isotypes of Inert and Antagonist Antibodies

[0201] In some embodiments, inert and/or antagonist anti-TREM antibodies have an Fc isotype listed in Table B below.

TABLE B
Exemplary anti-TREM2 antibody Fc isotypes with reduced
binding to Fc gamma receptor

| Fc Isotype | Mutation (EU numbering scheme) |
|---|---|
| IgG1 | N297A or N297Q |
| IgG1 | D265A and N297A |
| IgG1 | L234A and L235A |
| IgG2 | V234A and G237A |
| IgG4 | F235A and G237A and E318A |
| | E233P and/or F234V |
| | N297A or N297Q |
| IgG4 | S228P and L236E |
| | S241P |
| | S241P and L248E |
| | S228P and F234A and L235A |
| IgG2 | H268Q and V309L and A330S and P331S |
| IgG1 | C220S and C226S and C229S and P238S |
| IgG1 | C226S and C229S and E233P and L234V, and L235A |
| IgG1 | E233P and L234V and L235A and G236-deleted |
| | P238A |
| | D265A |
| | N297A |
| | A327Q or A327G |
| | P329A |
| IgG1 | K322A and L234A and L235A |
| IgG1 | L234F and L235E and P331S |
| IgG1 or IgG4 | T394D |
| IgG2 | C232S or C233S |
| | N297A or N297Q |
| IgG2 | V234A and G237A and P238S and H268A and V309L |
| | and A330S and P331S |
| IgG1, IgG2, | delta a, b, c, ab, ac, g modifications |
| or IgG4 | |
| IgG1 | Any of the above listed mutations together with A330L |
| | or L234F and/or L235E and/or P331S |
| IgG1, IgG2, | Any of the above listed mutations together with |
| or IgG4 | M252Y and/or S254T and/or T256E |

[0202] In certain embodiments, the antibody has an IgG1 isotype. In some embodiments, the antibody contains a mouse IgG1 constant region. In some embodiments, the antibody contains a human IgG1 constant region. In some embodiments, the human IgG1 constant region includes an Fc region. In some embodiments, the Fc region contains one or more modifications. For example, in some embodiments, the Fc region contains one or more amino acid substitutions (e.g., relative to a wild-type Fc region of the same isotype). In some embodiments, the one or more amino acid substitutions are selected from N297A, N297Q (Bolt S et al. (1993) Eur J Immunol 23:403-411), D265A, L234A, L235A (McEarchern et al., (2007) Blood, 109:1185-1192), C226S, C229S (McEarchern et al., (2007) Blood, 109:1185-1192), P238S (Davis et al., (2007) J Rheumatol, 34:2204-2210), E233P, L234V (McEarchern et al., (2007) Blood, 109:1185-1192), P238A, A327Q, A327G, P329A (Shields R L. et al., (2001) J Biol Chem. 276(9):6591-604), K322A, L234F, L235E (Hezareh, et al., (2001) J Virol 75, 12161-12168; Oganesyan et al., (2008). Acta Crystallographica 64, 700-704), P331S (Oganesyan et al., (2008) Acta Crystallographica 64, 700-704), T394D (Wilkinson et al. (2013) MAbs 5(3): 406-417), A330L, M252Y, S254T, and/or T256E, where the amino acid position is according to the EU or, Kabat numbering convention. In certain embodiments, the Fc region further includes an amino acid deletion at a position corresponding to glycine 236 according to the EU or, Kabat numbering convention.

[0203] In some embodiments, the antibody has an IgG1 isotype with a heavy chain constant region that contains a C220S amino acid substitution according to the EU or, Kabat numbering convention.

[0204] In some embodiments, the Fc region further contains one or more additional amino acid substitutions selected from t A330L, L234F; L235E, and/or P331S according to EU or, Kabat numbering convention.

[0205] In certain embodiments, the antibody has an IgG2 isotype. hi some embodiments, the antibody contains a human IgG2 constant region. In some embodiments, the human IgG2 constant region includes an Fc region. In some embodiments, the Fc region contains one or more modifications. For example, in some embodiments, the Fc region contains one or more amino acid substitutions (e.g., relative to a wild-type Fc region of the same isotype). In some embodiments, the one or more amino acid substitutions are selected from V234A, G237A, H268E, V309L, N297A, N297Q, A330S, P331S, C232S, C233S, M252Y, S254T, and/or T256E, where the amino acid position is according to the EU or, Kabat numbering convention.

[0206] In certain embodiments, the antibody has an IgG4 isotype. In some embodiments, the antibody contains a human IgG4 constant region. In some embodiments, the human IgG4 constant region includes an Fc region. In some embodiments, the Fc region contains one or more modifications. For example, in some embodiments, the Fc region contains one or more amino acid substitutions (e.g., relative to a wild-type Fc region of the same isotype). In some embodiments, the one or more amino acid substitutions are selected from E233P, F234V, L235A, G237A, E318A (Hutchins et al. (1995) Proc Natl Acad Sci USA, 92:11980-11984), S228P, L236E, S241P, L248E (Reddy et al., (2000) J Immunol, 164:1925-1933; Angal et al., (1993) Mol Immunol. 30(1):105-8; U.S. Pat. No. 8,614,299 B2), T394D, M252Y, S254T, T256E, and/or N297A, N297Q, where the amino acid position is according to the EU or, Kabat numbering convention.

[0207] In some embodiments, the Fc region further contains one or more additional amino acid substitutions selected from a M252Y, S254T, and/or T256E, where the amino acid position is according to the EU or, Kabat numbering convention.

[0208] Further IgG Mutations

[0209] In some embodiments, one or more of the IgG1 variants described herein may be combined with an A330L mutation (Lazar et al., (2006) Proc Natl Acad Sci USA, 103:4005-4010), or one or more of L234F, L235E, and/or P331S mutations (Sazinsky et al., (2008) Proc Natl Acad Sci USA, 105:20167-20172), where the amino acid position is according to the EU or, Kabat numbering convention, to eliminate complement activation. In some embodiments, the IgG variants described herein may be combined with one or more mutations to enhance the antibody half-life in human serum (e.g. M252Y, S254T, T256E mutations according to the EU or, Kabat numbering convention) (Dall'Acqua et al., (2006) J Biol Chem, 281:23514-23524; and Strohl e al., (2009) Current Opinion in Biotechnology, 20:685-691).

[0210] In some embodiments, an IgG4 variant of the present disclosure may be combined with an S228P mutation according to the EU or, Kabat numbering convention (Angal et al., (1993) Mol Immunol, 30:105-108) and/or with one or more mutations described in Peters et al., (2012) J Biol Chem. 13; 287(29):24525-33) to enhance antibody stabilization.

[0211] Exemplary Anti-TREM2 Antibodies

[0212] In some embodiments, an isolated anti-TREM2 antibody of the present disclosure enhances one or more TREM2 activities induced by binding of one or more TREM2 ligands to the TREM2 protein, as compared to the one or more TREM2 activities induced by binding of the one or more TREM2 ligands to the TREM2 protein in the absence of the isolated antibody. In some embodiments, the anti-TREM2 antibody enhances the one or more TREM2 activities without competing with or otherwise blocking binding of the one or more TREM2 ligands to the TREM2 protein. In some embodiments, the antibody is a human antibody, a humanized antibody, a bispecific antibody, a multivalent antibody, or a chimeric antibody. Exemplary descriptions of such antibodies are found throughout the present disclosure. In some embodiments, the antibody is a bispecific antibody recognizing a first antigen and a second antigen.

[0213] In some embodiments, anti-TREM2 antibodies of the present disclosure bind to a human TREM2, or a homolog thereof, including without limitation a mammalian (e.g., non-human mammalian) TREM2 protein, mouse TREM2 protein (Uniprot Accession No. Q99NH8), rat TREM2 protein (Uniprot Accession No. D3ZZ89), Rhesus monkey TREM2 protein (Uniprot Accession No. F6QVF2), bovine TREM2 protein (Uniprot Accession No. Q05B59), equine TREM2 protein (Uniprot Accession No. F7D6L0), pig TREM2 protein (Uniprot Accession No. H2EZZ3), and dog TREM2 protein (Uniprot Accession No. E2RP46). In some embodiments, anti-TREM2 antibodies of the present disclosure specifically bind to human TREM2. In some embodiments, anti-TREM2 antibodies of the present disclosure specifically bind to mouse TREM2. In some embodiments, anti-TREM2 antibodies of the present disclosure specifically bind to both human TREM2 and mouse TREM2. In some embodiments, anti-TREM2 antibodies of the present disclosure modulate (e.g., induce or inhibit) at least one TREM2 activity. In some embodiments, the at least one TREM2 activity includes, without limitation, (a) modulated expression of one or more anti-inflammatory mediators, optionally wherein the one or more anti-inflammatory mediators are selected from IL-4, IL-10 TGF-β, IL-13, IL-35 IL-16, IFN-alpha, IL-1Ra, VEGF, G-CSF, YM, AXL, FLT1, and soluble receptors for TNF or IL-6; (b) modulated expression of one or more anti-inflammatory mediators in one or more cells selected from macrophages, dendritic cells, bone marrow-derived dendritic cells, monocytes, osteoclasts, and microglial cells; (c) modulated expression of one or more pro-inflammatory mediators, optionally wherein the one or more pro-inflammatorymediators are selected from IFN-β, IL-1α, IL-1β, TNF-α, IL-6, IL-8, CRP, CD86, MCP-1/CCL2, CCL3, CCL4, CCL5, CCR2, CXCL-10, Gata3, IL-20 family members, IL-33, LIF, IFN-gamma, OSM, CNTF, CSF1, OPN, CD11c, GM-CSF, IL-11, IL-12, IL-17, IL-18, and IL-23; modulation of one or more genes whose expression is increased upon induction of inflammation, optionally wherein the one or more genes are selected from the group consisting of Fabp3, Fabp5, and LDR; modulating secretion of one or more pro-inflammatory mediators selected from IFN-β, IL-1α, IL-1β, CD86, TNF-α, IL-6, IL-8, CRP, MCP-1/CCL2, CCL3, CCL4, CCL5, CCR2, CXCL-10, Gata3, IL-20 family members, IL-33, LIF, IFN-gamma, OSM, CNTF, CSF1, OPN, CD11c, GM-CSF, IL-11, IL-12, IL-17, IL-18, and IL-23, and optionally where the modulation occurs in one or more cells selected from macrophages, M1 macrophages, activated M1 macrophages, M2 macrophages, dendritic cells, monocytes, osteoclasts, Langerhans cells of skin, Kupffer cells, and microglial cells; modulating secretion of one or more anti-inflammatory mediators selected from IL-4, IL-10 TGF-β, IL-13, IL-35 IL-16, IFN-alpha, IL-1Ra, VEGF, G-CSF, YM, AXL, FLT1, and soluble receptors for TNF or IL-6, and optionally where the modulation occurs in one or more cells selected from macrophages, M1 macrophages, activated M1 macrophages, M2 macrophages, dendritic cells, monocytes, osteoclasts, Langerhans cells of skin, Kupffer cells, and microglial cells; (d) modulated expression of one or more pro-inflammatory mediators in one or more cells selected from macrophages, dendritic cells, bone marrow-derived dendritic cells, monocytes, osteoclasts, and microglial cells; (e) activation of extracellular signal-regulated kinase (ERK) phosphorylation; (f) activating tyrosine phosphorylation on multiple cellular proteins; (g) modulated expression of C-C chemokine receptor 7 (CCR7); (h) activation of microglial cell chemotaxis toward CCL19 and CCL21 expressing cells; (i) increasing T cell priming and/or modulated T cell function of CD8+ T cells, CD4+ T cells, and/or regulatory T cells induced by one or more cells selected from dendritic cells, bone marrow-derived dendritic cells, monocytes, microglia, M1 microglia, activated M1 microglia, M2 microglia, macrophages, M1 macrophages, activated M1 macrophages, and M2 macrophages; (j) activation of osteoclast production, increased rate of rate of osteoclastogenesis, or both; (k) increased survival of one or more cells selected from dendritic cells, bone marrow-derived dendritic cells, macrophages, M1 macrophages, activated M1 macrophages, M2 macrophages, monocytes, osteoclasts, T cells, T helper cells, cytotoxic T cells, granulocytes, neutrophils, microglia, M1 microglia, activated M1 microglia, and M2 microglia; (l) increased proliferation of one or more cells selected from dendritic cells, bone marrow-derived dendritic cells, macrophages, M1 macrophages, activated M1 macrophages, M2 macrophages, monocytes, osteoclasts, T cells, T helper cells, cytotoxic T cells, granulocytes, neutrophils, microglia, M1 microglia, activated M1 microglia, and M2 microglia; (m) activating migration of one or more cells selected from dendritic cells, bone marrow-derived dendritic cells, macrophages, M1 macrophages, activated M1 macrophages, M2 macrophages, monocytes, osteoclasts, T cells, T helper cells, cytotoxic T cells, granulocytes, neutrophils, microglia, M1 microglia, activated M1 microglia, and M2 microglia; (n) activating one or more functions of one or more cells selected from dendritic cells, bone marrow-derived dendritic cells, macrophages, M1 macrophages, activated M1 macrophages, M2 macrophages, monocytes, osteoclasts, T cells, T helper cells, cytotoxic T cells, granulocytes, neutrophils, microglia, M1 microglia, activated M1 microglia, and M2 microglia; (o) activating maturation of one or more cells selected from dendritic cells, bone marrow-derived dendritic cells, macrophages, M1 macrophages, activated M1 macrophages, M2 macrophages, monocytes, osteoclasts, T cells, T helper cells, cytotoxic T cells, granulocytes, neutrophils, microglia, M1 microglia, activated M1 microglia, and M2 microglia; (p) activating of one or more types of clearance selected from apoptotic neuron clearance, nerve tissue debris clearance, non-nerve tissue debris clearance, bacteria clearance, other foreign body clearance, disease-causing protein clearance, disease-causing peptide clearance, and tumor cell clearance; optionally wherein the disease-causing protein is selected from amyloid beta, oligomeric amyloid beta, amyloid beta plaques, amyloid precursor protein or fragments thereof, Tau, IAPP, alpha-synuclein, TDP-43, FUS protein, C9orf72 (chromosome 9 open reading frame 72), c9RAN protein, prion protein, PrPSc, huntingtin, calcitonin, superoxide dismutase, ataxin, ataxin 1, ataxin 2, ataxin 3, ataxin 7, ataxin 8, ataxin 10, Lewy body, atrial natriuretic factor, islet amyloid polypeptide, insulin, apolipoprotein AI, serum amyloid A, medin, prolactin, transthyretin, lysozyme, beta 2 microglobulin, gelsolin, keratoepithelin, cystatin, immunoglobulin light chain AL, S-IBM protein, Repeat-associated non-ATG (RAN) translation products, DiPeptide repeat (DPR) peptides, glycine-alanine (GA) repeat peptides, glycine-proline (GP) repeat peptides, glycine-arginine (GR) repeat peptides, proline-alanine (PA) repeat peptides, ubiquitin, and proline-arginine (PR) repeat peptides and the tumor cell is from a cancer selected from bladder cancer, brain cancer, breast cancer, colon cancer, rectal cancer, endometrial cancer, kidney cancer, renal cell cancer, renal pelvis cancer, leukemia, lung cancer, melanoma, non-Hodgkin's lymphoma, pancreatic cancer, prostate cancer, ovarian cancer, fibrosarcoma, and thyroid cancer; (u) activation of phagocytosis of one or more of apoptotic neurons, nerve tissue debris, non-nerve tissue debris, bacteria, other foreign bodies, disease-causing proteins, disease-causing peptides, disease-causing nucleic acids, or tumor cells; optionally wherein the disease-causing nucleic acids are antisense GGCCCC (G2C4) repeat-expansion RNA, the disease-causing proteins are selected from amyloid beta, oligomeric amyloid beta, amyloid beta plaques, amyloid precursor protein or fragments thereof, Tau, IAPP, alpha-synuclein, TDP-43, FUS protein, C9orf72 (chromosome 9 open reading frame 72), c9RAN protein, prion protein, PrPSc, huntingtin, calcitonin, superoxide dismutase, ataxin, ataxin 1, ataxin 2, ataxin 3, ataxin 7, ataxin 8, ataxin 10, Lewy body, atrial natriuretic factor, islet amyloid polypeptide, insulin, apolipoprotein AI, serum amyloid A, medin, prolactin, transthyretin, lysozyme, beta 2 microglobulin, gelsolin, keratoepithelin, cystatin, immunoglobulin light chain AL, S-IBM protein, Repeat-associated non-ATG (RAN) translation products, DiPeptide repeat (DPR) peptides, glycine-alanine (GA) repeat peptides, glycine-proline (GP) repeat peptides, glycine-arginine (GR) repeat peptides, proline-alanine (PA) repeat peptides, ubiquitin, and proline-arginine (PR) repeat peptides, and the tumor cells are from a cancer selected from bladder cancer, brain cancer, breast cancer, colon cancer, rectal cancer, endometrial cancer, kidney cancer, renal cell cancer, renal pelvis cancer, leukemia, lung cancer, melanoma, non-Hodgkin's lymphoma, pancreatic cancer, prostate cancer, ovarian cancer, fibrosarcoma, or thyroid cancer; (p) binding to TREM2 ligand on tumor cells; (q) binding to TREM2 ligand on cells selected from neutrophils, dendritic cells, bone marrow-derived dendritic cells, monocytes, microglia, and macrophages; (r) activation of tumor cell killing by one or more of microglia, macrophages, dendritic cells, bone marrow-derived dendritic cells, neutrophils, T cells, T helper cells, or cytotoxic T cells; (s) activating anti-tumor cell proliferation activity of one or more of microglia, macrophages, dendritic cells, bone marrow-derived dendritic cells, neutrophils, T cells, T helper cells, or cytotoxic T cells; (t) activating anti-tumor cell metastasis activity of one or more of microglia, macrophages, dendritic cells, bone marrow-derived dendritic cells, neutrophils, T cells, T helper cells, or cytotoxic T cells; (y) activating of one or more ITAM motif containing receptors, optionally wherein the one or more ITAM motif containing receptors are selected from TREM1, TREM2, FcgR, DAP10, and DAP12; (z) activating of signaling by one or more pattern recognition receptors (PRRs), optionally wherein the one or more PRRs are selected from receptors that identify pathogen-associated molecular patterns (PAMPs), receptors that identify damage-associated molecular patterns (DAMPs), and any combination thereof; (aa) activating of one or more receptors comprising the motif D/Ex₀₋₂YxxL/IX₆₋₈YxxL/I (SEQ ID NO: 883); (bb) activating of signaling by one or more Toll-like receptors; (cc) activating of the JAK-STAT signaling pathway; (dd) activating of nuclear factor kappa-light-chain-enhancer of activated B cells (NFκB); (dd) phosphorylation of an ITAM motif containing receptor; (ee) modulated expression of one or more inflammatory receptors, optionally wherein the one or more inflammatory receptors comprise CD86 and the one or more inflammatory receptors are expressed on one or more of microglia, macrophages, dendritic cells, bone marrow-derived dendritic cells, neutrophils, T cells, T helper cells, or cytotoxic T cells; (ff) increasing expression of one or more TREM2-dependent genes; (gg) normalization of disrupted TREM2-dependent gene expression; (hh) increasing expression of one or more ITAM-dependent genes, optionally wherein the one more ITAM-dependent genes are activated by nuclear factor of activated T cells (NFAT) transcription factors; (ii) inhibiting differentiation of one or more of immunosuppressor dendritic cells, immunosuppressor macrophages, myeloid derived suppressor cells, tumor-associated macrophages, immunosuppressor neutrophils, and regulatory T cells; (jj) inhibiting functionality of one or more of immunosuppressor dendritic cells, immunosuppressor macrophages, myeloid-derived suppressor cells, tumor-associated macrophages, immunosuppressor neutrophils, and regulatory T cells; (kk) decreasing infiltration of one or more of immunosuppressor dendritic cells, immunosuppressor macrophages, myeloid derived suppressor cells, tumor-associated macrophages, immunosuppressor neutrophils, and regulatory T cells into tumors; (11) decreasing number of tumor-promoting myeloid/granulocytic immune-suppressive cells in a tumor, in peripheral blood, or other lymphoid organ; (mm) inhibiting tumor-promoting activity of myeloid-derived suppressor cells; (nn) decreasing expression of tumor-promoting cytokines in a tumor or in peripheral blood, optionally wherein the tumor-promoting cytokines are TGF-beta or IL-10; (oo) decreasing tumor infiltration of tumor-promoting FoxP3+ regulatory T lymphocytes; (pp) increasing activation of tumor-specific T lymphocytes with tumor killing potential; (qq) decreasing tumor volume; (rr) decreasing tumor growth rate; (ss) increasing efficacy of one or more immune-therapies that modulate anti-tumor T cell responses, optionally wherein the one or more immune-therapies are selected from PD1/PDL1 blockade, CTLA-4 blockade, and cancer vaccines; (tt) inhibition of PLCγ/PKC/calcium mobilization; and (uu) inhibition of PI3K/Akt, Ras/MAPK signaling. (vv) increasing phagocytosis by dendritic cells, macrophages, monocytes, and/or microglia (ww) induction or retaintion of TREM2 clustering on a cell surface; (xx) TREM2 binding to DAP12; (yy) TREM2 phosphorylation; (zz) DAP12 phosphorylation; (aaa) activation of one or more SRC family tyrosine kinases including Syk kinase; (bbb) recruitment of Syk, ZAP70, or both to a DAP12/TREM2 complex; (ccc) modulating expression of one or more proteins selected from C1qa, C1qB, C1qC, C1s, C1R, C4, C2, C3, ITGB2, HMOX1, LAT2. CASP1, CSTA, VSIG4, MS4A4A, C3AR1, GPX1, TyroBP, ALOXSAP, ITGAM, SLC7A7, CD4, ITGAX, PYCARD, and VEGF; (ddd) increasing memory; and (eee) reducing cognitive deficit.

[0214] In some embodiments, anti-TREM2 antibodies of the present disclosure bind to membrane bound or soluble form of a TREM2 protein of the present disclosure and/or naturally occurring variants. In certain preferred embodiments, the anti-TREM2 antibodies bind to human TREM2.

[0215] In some embodiments, anti-TREM2 antibodies of the present disclosure are agonist antibodies or antagonist antibodies that bind to a TREM2 protein of the present disclosure expressed on the surface of a cell and modulate (e.g., induce or inhibit) at least one TREM2 activity of the present disclosure after binding to the surface-expressed TREM2 protein. In some embodiments, anti-TREM2 antibodies of the present disclosure are inert antibodies.

[0216] Anti-TREM2 Antibody-Binding Regions

[0217] Certain aspects of the preset disclosure provide anti-TREM2 antibodies that bind to one or more amino acids within amino acid residues 19-174; 29-112; 113-174; 35-49, 35-49 and 140-150; 39-49, 39-49 and 63-77; 51-61; 55-62; 55-62, 104-109, and 148-158; 55-62, 104-109, and 160-166; 55-65, 55-65 and 124-134; 63-73; 63-77; 104-109; 117-133; 124-134; 137-146; 139-147; 139-149; 140-150; 140-146; 140-143; 142-152; 146-154; 148-158; 149-157; 149 and 150; 151-155; 154-161; 156-170; 160-166; or 162-165 of human TREM2 (SEQ ID NO: 1), or within amino acid residues on a TREM2 homolog or ortholog corresponding to amino acid residues 19-174; 29-112; 113-174; 35-49, 35-49 and 140-150; 39-49, 39-49 and 63-77; 51-61; 55-62; 55-62, 104-109, and 148-158; 55-62, 104-109, and 160-166; 55-65, 55-65 and 124-134; 63-73; 63-77; 104-109; 117-133; 124-134; 137-146; 139-147; 139-149; 140-150; 140-146; 140-143; 142-152; 146-154; 148-158; 149-157; 149 and 150; 151-155; 154-161; 156-170; 160-166; or 162-165 of SEQ ID NO: 1. In some embodiments, the anti-TREM2 antibody binds to one or more amino acids within amino acid residues 35-49 of human TREM2 (SEQ ID NO: 1), or within amino acid residues on a TREM2 homolog or ortholog corresponding to amino acid residues 35-49 of SEQ ID NO: 1. In some embodiments, the anti-TREM2 antibody binds to one or more amino acids within amino acid residues 35-49 and 140-150 of human TREM2 (SEQ ID NO: 1), or within amino acid residues on a TREM2 homolog or ortholog corresponding to amino acid residues 35-49 and 140-150 of SEQ ID NO: 1. In some embodiments, the anti-TREM2 antibody binds to one or more amino acids within amino acid residues 39-49 of human TREM2 (SEQ ID NO: 1), or within amino acid residues on a TREM2 homolog or ortholog corresponding to amino acid residues 39-49 of SEQ ID NO: 1. In some embodiments, the anti-TREM2 antibody binds to one or more amino acids within amino acid residues 39-49 and 63-77 of human TREM2 (SEQ ID NO: 1), or within amino acid residues on a TREM2 homolog or ortholog corresponding to amino acid residues 39-49 and 63-77 of SEQ ID NO: 1. In some embodiments, the anti-TREM2 antibody binds to one or more amino acids within amino acid residues 51-61 of human TREM2 (SEQ ID NO: 1), or within amino acid residues on a TREM2 homolog or ortholog corresponding to amino acid residues 51-61 of SEQ ID NO: 1. In some embodiments, the anti-TREM2 antibody binds to one or more amino acids within amino acid residues 55-62 of human TREM2 (SEQ ID NO: 1), or within amino acid residues on a TREM2 homolog or ortholog corresponding to amino acid residues 55-62 of SEQ ID NO: 1. In some embodiments, the anti-TREM2 antibody binds to one or more amino acids within amino acid residues 55-62, 104-109, and 148-158 and of human TREM2 (SEQ ID NO: 1), or within amino acid residues on a TREM2 homolog or ortholog corresponding to amino acid residues 55-62, 104-109, and 148-158 of SEQ ID NO: 1. In some embodiments, the anti-TREM2 antibody binds to one or more amino acids within amino acid residues 55-62, 104-109, and 160-166 and of human TREM2 (SEQ ID NO: 1), or within amino acid residues on a TREM2 homolog or ortholog corresponding to amino acid residues 55-62, 104-109, and 160-166 of SEQ ID NO: 1. In some embodiments, the anti-TREM2 antibody binds to one or more amino acids within amino acid residues 55-65 of human TREM2 (SEQ ID NO: 1), or within amino acid residues on a TREM2 homolog or ortholog corresponding to amino acid residues 55-65 of SEQ ID NO: 1. In some embodiments, the anti-TREM2 antibody binds to one or more amino acids within amino acid residues 55-65 and 124-134 of human TREM2 (SEQ ID NO: 1), or within amino acid residues on a TREM2 homolog or ortholog corresponding to amino acid residues 55-65 and 124-134 of SEQ ID NO: 1. In some embodiments, the anti-TREM2 antibody binds to one or more amino acids within amino acid residues 63-73 of human TREM2 (SEQ ID NO: 1), or within amino acid residues on a TREM2 homolog or ortholog corresponding to amino acid residues 63-73 of SEQ ID NO: 1. In some embodiments, the anti-TREM2 antibody binds to one or more amino acids within amino acid residues 63-77 of human TREM2 (SEQ ID NO: 1), or within amino acid residues on a TREM2 homolog or ortholog corresponding to amino acid residues 63-77 of SEQ ID NO: 1. In some embodiments, the anti-TREM2 antibody binds to one or more amino acids within amino acid residues 104-109 of human TREM2 (SEQ ID NO: 1), or within amino acid residues on a TREM2 homolog or ortholog corresponding to amino acid residues 104-109 of SEQ ID NO: 1. In some embodiments, the anti-TREM2 antibody binds to one or more amino acids within amino acid residues 117-133 of human TREM2 (SEQ ID NO: 1), or within amino acid residues on a TREM2 homolog or ortholog corresponding to amino acid residues 117-133 of SEQ ID NO: 1. In some embodiments, the anti-TREM2 antibody binds to one or more amino acids within amino acid residues 124-134 of human TREM2 (SEQ ID NO: 1), or within amino acid residues on a TREM2 homolog or ortholog corresponding to amino acid residues 124-134 of SEQ ID NO: 1.In some embodiments, the anti-TREM2 antibody binds to one or more amino acids within amino acid residues 137-146 of human TREM2 (SEQ ID NO: 1), or within amino acid residues on a TREM2 homolog or ortholog corresponding to amino acid residues 137-146 of SEQ ID NO: 1. In some embodiments, the anti-TREM2 antibody binds to one or more amino acids within amino acid residues 139-147 of human TREM2 (SEQ ID NO: 1), or within amino acid residues on a TREM2 homolog or ortholog corresponding to amino acid residues 139-147 of SEQ ID NO: 1. In some embodiments, the anti-TREM2 antibody binds to one or more amino acids within amino acid residues 139-149 of human TREM2 (SEQ ID NO: 1), or within amino acid residues on a TREM2 homolog or ortholog corresponding to amino acid residues 139-149 of SEQ ID NO: 1. In some embodiments, the anti-TREM2 antibody binds to one or more amino acids within amino acid residues 140-150 of human TREM2 (SEQ ID NO: 1), or within amino acid residues on a TREM2 homolog or ortholog corresponding to amino acid residues 140-150 of SEQ ID NO: 1. In some embodiments, the anti-TREM2 antibody binds to one or more amino acids within amino acid residues 140-146 of human TREM2 (SEQ ID NO: 1), or within amino acid residues on a TREM2 homolog or ortholog corresponding to amino acid residues 140-146 of SEQ ID NO: 1. In some embodiments, the anti-TREM2 antibody binds to one or more amino acids within amino acid residues 140-143 of human TREM2 (SEQ ID NO: 1), or within amino acid residues on a TREM2 homolog or ortholog corresponding to amino acid residues 140-143 of SEQ ID NO: 1. In some embodiments, the anti-TREM2 antibody binds to one or more amino acids within amino acid residues 142-152 of human TREM2 (SEQ ID NO: 1), or within amino acid residues on a TREM2 homolog or ortholog corresponding to amino acid residues 142-152 of SEQ ID NO: 1. In some embodiments, the anti-TREM2 antibody binds to one or more amino acids within amino acid residues 146-154 of human TREM2 (SEQ ID NO: 1), or within amino acid residues on a TREM2 homolog or ortholog corresponding to amino acid residues 146-154 of SEQ ID NO: 1. In some embodiments, the anti-TREM2 antibody binds to one or more amino acids within amino acid residues 148-158 of human TREM2 (SEQ ID NO: 1), or within amino acid residues on a TREM2 homolog or ortholog corresponding to amino acid residues 148-158 of SEQ ID NO: 1. In some embodiments, the anti-TREM2 antibody binds to one or more amino acids within amino acid residues 149-157 of human TREM2 (SEQ ID NO: 1), or within amino acid residues on a TREM2 homolog or ortholog corresponding to amino acid residues 149-157 of SEQ ID NO: 1. In some embodiments, the anti-TREM2 antibody binds to one or more amino acids within amino acid residues 149 and 150 of human TREM2 (SEQ ID NO: 1), or within amino acid residues on a TREM2 homolog or ortholog corresponding to amino acid residues 149 and 150 of SEQ ID NO: 1. In some embodiments, the anti-TREM2 antibody binds to one or more amino acids within amino acid residues 154-161 of human TREM2 (SEQ ID NO: 1), or within amino acid residues on a TREM2 homolog or ortholog corresponding to amino acid residues 154-161 of SEQ ID NO: 1. In some embodiments, the anti-TREM2 antibody binds to one or more amino acids within amino acid residues 156-170 of human TREM2 (SEQ ID NO: 1), or within amino acid residues on a TREM2 homolog or ortholog corresponding to amino acid residues 156-170 of SEQ ID NO: 1. In some embodiments, the anti-TREM2 antibody binds to one or more amino acids within amino acid residues 160-166 of human TREM2 (SEQ ID NO: 1), or within amino acid residues on a TREM2 homolog or ortholog corresponding to amino acid residues 160-166 of SEQ ID NO: 1. In some embodiments, the anti-TREM2 antibody binds to one or more amino acids within amino acid residues 162-165 of human TREM2 (SEQ ID NO: 1), or within amino acid residues on a TREM2 homolog or ortholog corresponding to amino acid residues 162-165 of SEQ ID NO: 1.

[0218] In other embodiments, anti-TREM2 antibodies of the present disclosure bind to an epitope that includes amino acid residue Arg47 or Asp87 of human TREM 2 (SEQ ID NO: 1). In some embodiments, anti-TREM2 antibodies of the present disclosure bind to an epitope that includes amino acid residues 40-44 of human TREM 2 (SEQ ID NO: 1). In some embodiments, anti-TREM2 antibodies of the present disclosure bind to an epitope that includes amino acid residues 67-76 of human TREM 2 (SEQ ID NO: 1). In some embodiments, anti-TREM2 antibodies of the present disclosure bind to an epitope that includes amino acid residues 114-118 of human TREM 2 (SEQ ID NO: 1).

[0219] In some embodiments, an anti-TREM2 antibody of the present disclosure binds to one or more amino acid residues selected from K42, H43, W44, G45, H67, R77, T88, H114, E117, E151, D152, H154, and E156 of SEQ ID NO: 1, or one or more amino acid residues on a mammalian TREM2 protein corresponding to an amino acid residue selected from K42, H43, W44, G45, H67, R77, T88, H114, E117, E151, D152, H154, and E156 of SEQ ID NO: 1. In some embodiments, an anti-TREM2 antibody of the present disclosure binds to one or more, two or more, three or more, or all four amino acid residues selected from E151, D152, H154, and E156 of SEQ ID NO: 1, or one or more, two or more, three or more, or all four amino acid residues on a mammalian TREM2 protein corresponding to an amino acid residue selected from E151, D152, H154, and E156 of SEQ ID NO: 1. In some embodiments, an anti-TREM2 antibody of the present disclosure binds to one or more or all two amino acid residues selected from K42 and H114 of SEQ ID NO: 1, or one or more, or all two amino acid residues on a mammalian TREM2 protein corresponding to an amino acid residue selected from K42 and H114 of SEQ ID NO: 1. In some embodiments, an anti-TREM2 antibody of the present disclosure binds to one or more, two or more, or all three amino acid residues selected from K42, G45, and H114 of SEQ ID NO: 1, or one or more, two or more, or all three amino acid residues on a mammalian TREM2 protein corresponding to an amino acid residue selected from K42, G45, and H114 of SEQ ID NO: 1. In some embodiments, an anti-TREM2 antibody of the present disclosure binds to the amino acid residue R77 of SEQ ID NO: 1, or an amino acid residue on a mammalian TREM2 protein corresponding to the amino acid residue R77 of SEQ ID NO: 1.

[0220] In some embodiments, anti-TREM2 antibodies of the present disclosure competitively inhibit binding of at least one antibody selected from any of the antibodies listed in Tables 2A, 2B, 3A, 3B, 4A, 4B, 7A, and 7B. In some embodiments, anti-TREM2 antibodies of the present disclosure competitively inhibit binding of at least one antibody selected from 11A7, 3A2, 3B10, 6G12, 6H6, 7A9, 7B3, 8A1, 8E10, 8F11, 8F8, 9F5, 9G1, 9G3, 10A9, 10C1, 11A8, 12E2, 12F9, 12G6, 2C7, 2F5, 3C1, 4D7, 4D11, 6C11, 6G12, 7A3, 7C5, 7E9, 7F6, 7G1, 7H1, 8C3, 8F10, 12A1, 1E9, 2C5, 3C5, 4C12, 4F2, 5A2, 6B3, 7D1, 7D9, 11D8, 8A12, 10E7, 10B11, 10D2, 7D5, 2A7, 3G12, 6H9, 8G9, 9B4, 10A1, 11A8, 12F3, 2F8, 10E3, 1H7, 2F6, 2H8, 3A7, 7E5, 7F8, 11H5, 7C5, 4F11, 12D9, 1B4v1, 1B4v2, 6H2, 7B11v1, 7B11v2, 18D8, 18E4v1, 18E4v2, 29F6v1, 29F6v2, 40D5v1, 40D5v2, 43B9, 44A8v1, 44A8v2, 44B4v1, and 44B4v2.

[0221] In some embodiments, anti-TREM2 antibodies of the present disclosure bind to an epitope of human TREM2 that is the same as or overlaps with the TREM2 epitope bound by at least one antibody selected from any of the antibodies listed in Tables 2A, 2B, 3A, 3B, 4A, 4B, 7A, and 7B. In some embodiments, anti-TREM2 antibodies of the present disclosure bind to an epitope of human TREM2 that is the same as or overlaps with the TREM2 epitope bound by at least one antibody selected from 11A7, 3A2, 3B10, 6G12, 6H6, 7A9, 7B3, 8A1, 8E10, 8F11, 8F8, 9F5, 9G1, 9G3, 10A9, 10C1, 11A8, 12E2, 12F9, 12G6, 2C7, 2F5, 3C1, 4D7, 4D11, 6C11, 6G12, 7A3, 7C5, 7E9, 7F6, 7G1, 7H1, 8C3, 8F10, 12A1, 1E9, 2C5, 3C5, 4C12, 4F2, 5A2, 6B3, 7D1, 7D9, 11D8, 8A12, 10E7, 10B11, 10D2, 7D5, 2A7, 3G12, 6H9, 8G9, 9B4, 10A1, 11A8, 12F3, 2F8, 10E3, 1H7, 2F6, 2H8, 3A7, 7E5, 7F8, 11H5, 7C5, 4F11, 12D9, 1B4v1, 1B4v2, 6H2, 7B11v1, 7B11v2, 18D8, 18E4v1, 18E4v2, 29F6v1, 29F6v2, 40D5v1, 40D5v2, 43B9, 44A8v1, 44A8v2, 44B4v1, and 44B4v2.

[0222] In some embodiments, anti-TREM2 antibodies of the present disclosure bind essentially the same TREM2 epitope bound by at least one antibody selected from any of the antibodies listed in Tables 2A, 2B, 3A, 3B, 4A, 4B, 7A, and 7B. In some embodiments, anti-TREM2 antibodies of the present disclosure bind essentially the same TREM2 epitope bound by at least one antibody selected from 1A7, 3A2, 3B10, 6G12, 6H6, 7A9, 7B3, 8A1, 8E10, 8F11, 8F8, 9F5, 9G1, 9G3, 10A9, 10C1, 11A8, 12E2, 12F9, 12G6, 2C7, 2F5, 3C1, 4D7, 4D11, 6C11, 6G12, 7A3, 7C5, 7E9, 7F6, 7G1, 7H1, 8C3, 8F10, 12A1, 1E9, 2C5, 3C5, 4C12, 4F2, 5A2, 6B3, 7D1, 7D9, 11D8, 8A12, 10E7, 10B11, 10D2, 7D5, 2A7, 3G12, 6H9, 8G9, 9B4, 10A1, 11A8, 12F3, 2F8, 10E3, 1H7, 2F6, 2H8, 3A7, 7E5, 7F8, 11H5, 7C5, 4F11, 12D9, 1B4v1, 1B4v2, 6H2, 7B11v1, 7B11v2, 18D8, 18E4v1, 18E4v2, 29F6v1, 29F6v2, 40D5v1, 40D5v2, 43B9, 44A8v1, 44A8v2, 44B4v1, and 44B4v2. Detailed exemplary methods for mapping an epitope to which an antibody binds are provided in Morris (1996) “Epitope Mapping Protocols,” in Methods in Molecular Biology vol. 66 (Humana Press, Totowa, N.J.).

[0223] In some embodiments, anti-TREM2 antibodies of the present disclosure compete with one or more antibodies selected from 1A7, 3A2, 3B10, 6G12, 6H6, 7A9, 7B3, 8A1, 8E10, 8F11, 8F8, 9F5, 9G1, 9G3, 10A9, 10C1, 11A8, 12E2, 12F9, 12G6, 2C7, 2F5, 3C1, 4D7, 4D11, 6C11, 6G12, 7A3, 7C5, 7E9, 7F6, 7G1, 7H1, 8C3, 8F10, 12A1, 1E9, 2C5, 3C5, 4C12, 4F2, 5A2, 6B3, 7D1, 7D9, 11D8, 8A12, 10E7, 10B11, 10D2, 7D5, 2A7, 3G12, 6H9, 8G9, 9B4, 10A1, 11A8, 12F3, 2F8, 10E3, 1H7, 2F6, 2H8, 3A7, 7E5, 7F8, 11H5, 7C5, 4F11, 12D9, 1B4v1, 1B4v2, 6H2, 7B11v1, 7B11v2, 18D8, 18E4v1, 18E4v2, 29F6v1, 29F6v2, 40D5v1, 40D5v2, 43B9, 44A8v1, 44A8v2, 44B4v1, and 44B4v2, and any combination thereof for binding to TREM2.

[0224] In an exemplary competition assay, immobilized TREM2 or cells expressing TREM2 on the cell surface are incubated in a solution comprising a first labeled antibody that binds to TREM2 (e.g., human or non-human primate) and a second unlabeled antibody that is being tested for its ability to compete with the first antibody for binding to TREM2. The second antibody may be present in a hybridoma supernatant. As a control, immobilized TREM2 or cells expressing TREM2 is incubated in a solution comprising the first labeled antibody but not the second unlabeled antibody. After incubation under conditions permissive for binding of the first antibody to TREM2, excess unbound antibody is removed, and the amount of label associated with immobilized TREM2 or cells expressing TREM2 is measured. If the amount of label associated with immobilized TREM2 or cells expressing TREM2 is substantially reduced in the test sample relative to the control sample, then that indicates that the second antibody is competing with the first antibody for binding to TREM2. See, Harlow and Lane (1988) Antibodies: A Laboratory Manual ch.14 (Cold Spring Harbor Laboratory, Cold Spring Harbor, N.Y.).

[0225] Anti-TREM2 Antibody Light Chain and Heavy Chain Variable Regions

[0226] In some embodiments, anti-TREM2 antibodies of the present disclosure comprise (a) a light chain variable region comprising at least one, two, or three HVRs selected from HVR-L1, HVR-L2, and HVR-L3 of any one of the antibodies listed in Tables 2A, 2B, 3A, 3B, 4A, 4B, 7A, and 7B, or selected from 1A7, 3A2, 3B10, 6G12, 6H6, 7A9, 7B3, 8A1, 8E10, 8F11, 8F8, 9F5, 9G1, 9G3, 10A9, 10C1, 11A8, 12E2, 12F9, 12G6, 2C7, 2F5, 3C1, 4D7, 4D11, 6C11, 6G12, 7A3, 7C5, 7E9, 7F6, 7G1, 7H1, 8C3, 8F10, 12A1, 1E9, 2C5, 3C5, 4C12, 4F2, 5A2, 6B3, 7D1, 7D9, 11D8, 8A12, 10E7, 10B11, 10D2, 7D5, 2A7, 3G12, 6H9, 8G9, 9B4, 10A1, 11A8, 12F3, 2F8, 10E3, 1H7, 2F6, 2H8, 3A7, 7E5, 7F8, 11H5, 7C5, 4F11, 12D9, 1B4v1, 1B4v2, 6H2, 7B11v1, 7B11v2, 18D8, 18E4v1, 18E4v2, 29F6v1, 29F6v2, 40D5v1, 40D5v2, 43B9, 44A8v1, 44A8v2, 44B4v1, and 44B4v2, and any combination thereof; and/or (b) a heavy chain variable region comprising at least one, two, or three HVRs selected from HVR-H1, HVR-H2, and HVR-H3 of any one of the antibodies listed in Tables 2A, 2B, 3A, 3B, 4A, 4B, 7A, and 7B, or selected from 1A7, 3A2, 3B10, 6G12, 6H6, 7A9, 7B3, 8A1, 8E10, 8F11, 8F8, 9F5, 9G1, 9G3, 10A9, 10C1, 11A8, 12E2, 12F9, 12G6, 2C7, 2F5, 3C1, 4D7, 4D11, 6C11, 6G12, 7A3, 7C5, 7E9, 7F6, 7G1, 7H1, 8C3, 8F10, 12A1, 1E9, 2C5, 3C5, 4C12, 4F2, 5A2, 6B3, 7D1, 7D9, 11D8, 8A12, 10E7, 10B11, 10D2, 7D5, 2A7, 3G12, 6H9, 8G9, 9B4, 10A1, 11A8, 12F3, 2F8, 10E3, 1H7, 2F6, 2H8, 3A7, 7E5, 7F8, 11H5, 7C5, 4F11, 12D9, 1B4v1, 1B4v2, 6H2, 7B11v1, 7B11v2, 18D8, 18E4v1, 18E4v2, 29F6v1, 29F6v2, 40D5v1, 40D5v2, 43B9, 44A8v1, 44A8v2, 44B4v1, and 44B4v2, and any combination thereof. In some embodiments, the HVR-L1, HVR-L2, HVR-L3, HVR-H1, HVR-H2, and HVR-H3 comprise EU or Kabat HVR, Chothia HVR, or Contact HVR sequences as shown in Tables 2A, 2B, 3A, 3B, 4A, 4B, 7A, and 7B, or from an antibody selected from 1A7, 3A2, 3B10, 6G12, 6H6, 7A9, 7B3, 8A1, 8E10, 8F11, 8F8, 9F5, 9G1, 9G3, 10A9, 10C1, 11A8, 12E2, 12F9, 12G6, 2C7, 2F5, 3C1, 4D7, 4D11, 6C11, 6G12, 7A3, 7C5, 7E9, 7F6, 7G1, 7H1, 8C3, 8F10, 12A1, 1E9, 2C5, 3C5, 4C12, 4F2, 5A2, 6B3, 7D1, 7D9, 11D8, 8A12, 10E7, 10B11, 10D2, 7D5, 2A7, 3G12, 6H9, 8G9, 9B4, 10A1, 11A8, 12F3, 2F8, 10E3, 1H7, 2F6, 2H8, 3A7, 7E5, 7F8, 11H5, 7C5, 4F11, 12D9, 1B4v1, 1B4v2, 6H2, 7B11v1, 7B11v2, 18D8, 18E4v1, 18E4v2, 29F6v1, 29F6v2, 40D5v1, 40D5v2, 43B9, 44A8v1, 44A8v2, 44B4v1, and 44B4v2, and any combination thereof.

[0227] In some embodiments, anti-TREM2 antibodies of the present disclosure comprise at least one, two, three, four, five, or six HVRs selected from (i) HVR-L1 comprising the amino acid sequence of any of the HVR-L1 sequences listed in Tables 2A, 2B, 3A, 3B, 4A, 4B, 7A, and 7B, or from an antibody selected from 1A7, 3A2, 3B10, 6G12, 6H6, 7A9, 7B3, 8A1, 8E10, 8F11, 8F8, 9F5, 9G1, 9G3, 10A9, 10C1, 11A8, 12E2, 12F9, 12G6, 2C7, 2F5, 3C1, 4D7, 4D11, 6C11, 6G12, 7A3, 7C5, 7E9, 7F6, 7G1, 7H1, 8C3, 8F10, 12A1, 1E9, 2C5, 3C5, 4C12, 4F2, 5A2, 6B3, 7D1, 7D9, 11D8, 8A12, 10E7, 10B11, 10D2, 7D5, 2A7, 3G12, 6H9, 8G9, 9B4, 10A1, 11A8, 12F3, 2F8, 10E3, 1H7, 2F6, 2H8, 3A7, 7E5, 7F8, 11H5, 7C5, 4F11, 12D9, 1B4v1, 1B4v2, 6H2, 7B11v1, 7B11v2, 18D8, 18E4v1, 18E4v2, 29F6v1, 29F6v2, 40D5v1, 40D5v2, 43B9, 44A8v1, 44A8v2, 44B4v1, and 44B4v2; (ii) HVR-L2 comprising the amino acid sequence of any of the HVR-L2 sequences listed in Tables 2A, 2B, 3A, 3B, 4A, 4B, 7A, and 7B, or from an antibody selected from 1A7, 3A2, 3B10, 6G12, 6H6, 7A9, 7B3, 8A1, 8E10, 8F11, 8F8, 9F5, 9G1, 9G3, 10A9, 10C1, 11A8, 12E2, 12F9, 12G6, 2C7, 2F5, 3C1, 4D7, 4D11, 6C11, 6G12, 7A3, 7C5, 7E9, 7F6, 7G1, 7H1, 8C3, 8F10, 12A1, 1E9, 2C5, 3C5, 4C12, 4F2, 5A2, 6B3, 7D1, 7D9, 11D8, 8A12, 10E7, 10B11, 10D2, 7D5, 2A7, 3G12, 6H9, 8G9, 9B4, 10A1, 11A8, 12F3, 2F8, 10E3, 1H7, 2F6, 2H8, 3A7, 7E5, 7F8, 11H5, 7C5, 4F11, 12D9, 1B4v1, 1B4v2, 6H2, 7B11v1, 7B11v2, 18D8, 18E4v1, 18E4v2, 29F6v1, 29F6v2, 40D5v1, 40D5v2, 43B9, 44A8v1, 44A8v2, 44B4v1, and 44B4v2; (iii) HVR-L3 comprising the amino acid sequence of any of the HVR-L3 sequences listed in Tables 2A, 2B, 3A, 3B, 4A, 4B, 7A, and 7B, or from an antibody selected from 1A7, 3A2, 3B10, 6G12, 6H6, 7A9, 7B3, 8A1, 8E10, 8F11, 8F8, 9F5, 9G1, 9G3, 10A9, 10C1, 11A8, 12E2, 12F9, 12G6, 2C7, 2F5, 3C1, 4D7, 4D11, 6C11, 6G12, 7A3, 7C5, 7E9, 7F6, 7G1, 7H1, 8C3, 8F10, 12A1, 1E9, 2C5, 3C5, 4C12, 4F2, 5A2, 6B3, 7D1, 7D9, 11D8, 8A12, 10E7, 10B11, 10D2, 7D5, 2A7, 3G12, 6H9, 8G9, 9B4, 10A1, 11A8, 12F3, 2F8, 10E3, 1H7, 2F6, 2H8, 3A7, 7E5, 7F8, 11H5, 7C5, 4F11, 12D9, 1B4v1, 1B4v2, 6H2, 7B11v1, 7B11v2, 18D8, 18E4v1, 18E4v2, 29F6v1, 29F6v2, 40D5v1, 40D5v2, 43B9, 44A8v1, 44A8v2, 44B4v1, and 44B4v2; (iv) HVR-H1 comprising the amino acid sequence of any of the HVR-H1 sequences listed in Tables 2A, 2B, 3A, 3B, 4A, 4B, 7A, and 7B, or from an antibody selected from 1A7, 3A2, 3B10, 6G12, 6H6, 7A9, 7B3, 8A1, 8E10, 8F11, 8F8, 9F5, 9G1, 9G3, 10A9, 10C1, 11A8, 12E2, 12F9, 12G6, 2C7, 2F5, 3C1, 4D7, 4D11, 6C11, 6G12, 7A3, 7C5, 7E9, 7F6, 7G1, 7H1, 8C3, 8F10, 12A1, 1E9, 2C5, 3C5, 4C12, 4F2, 5A2, 6B3, 7D1, 7D9, 11D8, 8A12, 10E7, 10B11, 10D2, 7D5, 2A7, 3G12, 6H9, 8G9, 9B4, 10A1, 11A8, 12F3, 2F8, 10E3, 1H7, 2F6, 2H8, 3A7, 7E5, 7F8, 11H5, 7C5, 4F11, 12D9, 1B4v1, 1B4v2, 6H2, 7B11v1, 7B11v2, 18D8, 18E4v1, 18E4v2, 29F6v1, 29F6v2, 40D5v1, 40D5v2, 43B9, 44A8v1, 44A8v2, 44B4v1, and 44B4v2; (v) HVR-H2 comprising the amino acid sequence of any of the HVR-H2 sequences listed in Tables 2A, 2B, 3A, 3B, 4A, 4B, 7A, and 7B, or from an antibody selected from 1A7, 3A2, 3B10, 6G12, 6H6, 7A9, 7B3, 8A1, 8E10, 8F11, 8F8, 9F5, 9G1, 9G3, 10A9, 10C1, 11A8, 12E2, 12F9, 12G6, 2C7, 2F5, 3C1, 4D7, 4D11, 6C11, 6G12, 7A3, 7C5, 7E9, 7F6, 7G1, 7H1, 8C3, 8F10, 12A1, 1E9, 2C5, 3C5, 4C12, 4F2, 5A2, 6B3, 7D1, 7D9, 11D8, 8A12, 10E7, 10B11, 10D2, 7D5, 2A7, 3G12, 6H9, 8G9, 9B4, 10A1, 11A8, 12F3, 2F8, 10E3, 1H7, 2F6, 2H8, 3A7, 7E5, 7F8, 11H5, 7C5, 4F11, 12D9, 1B4v1, 1B4v2, 6H2, 7B11v1, 7B11v2, 18D8, 18E4v1, 18E4v2, 29F6v1, 29F6v2, 40D5v1, 40D5v2, 43B9, 44A8v1, 44A8v2, 44B4v1, and 44B4v2; and (vi) HVR-H3 comprising the amino acid sequence of any of the HVR-H3 sequences listed in Tables 2A, 2B, 3A, 3B, 4A, 4B, 7A, and 7B, or from an antibody selected from 1A7, 3A2, 3B10, 6G12, 6H6, 7A9, 7B3, 8A1, 8E10, 8F11, 8F8, 9F5, 9G1, 9G3, 10A9, 10C1, 11A8, 12E2, 12F9, 12G6, 2C7, 2F5, 3C1, 4D7, 4D11, 6C11, 6G12, 7A3, 7C5, 7E9, 7F6, 7G1, 7H1, 8C3, 8F10, 12A1, 1E9, 2C5, 3C5, 4C12, 4F2, 5A2, 6B3, 7D1, 7D9, 11D8, 8A12, 10E7, 10B11, 10D2, 7D5, 2A7, 3G12, 6H9, 8G9, 9B4, 10A1, 11A8, 12F3, 2F8, 10E3, 1H7, 2F6, 2H8, 3A7, 7E5, 7F8, 11H5, 7C5, 4F11, 12D9, 1B4v1, 1B4v2, 6H2, 7B11v1, 7B11v2, 18D8, 18E4v1, 18E4v2, 29F6v1, 29F6v2, 40D5v1, 40D5v2, 43B9, 44A8v1, 44A8v2, 44B4v1, and 44B4v2. In some embodiments, anti-TREM2 antibodies of the present disclosure comprise a light chain variable domain and a heavy chain variable domain, wherein (a) the HVR-L1 comprises the amino acid sequence of SEQ ID NO: 9, the HVR-L2 comprises the amino acid sequence of SEQ ID NO: 24, the HVR-L3 comprises the amino acid sequence of SEQ ID NO: 34, the HVR-H1 comprises the amino acid sequence of SEQ ID NO: 48, the HVR-H2 comprises the amino acid sequence of SEQ ID NO: 66, and the HVR-H3 comprises the amino acid sequence of SEQ ID NO: 85; (b) the HVR-L1 comprises the amino acid sequence of SEQ ID NO: 9, the HVR-L2 comprises the amino acid sequence of SEQ ID NO: 24, the HVR-L3 comprises the amino acid sequence of SEQ ID NO: 34, the HVR-H1 comprises the amino acid sequence of SEQ ID NO: 48, the HVR-H2 comprises the amino acid sequence of SEQ ID NO: 66, and the HVR-H3 comprises the amino acid sequence of SEQ ID NO: 85; (c) the HVR-L1 comprises the amino acid sequence of SEQ ID NO: 10, the HVR-L2 comprises the amino acid sequence of SEQ ID NO: 25, the HVR-L3 comprises the amino acid sequence of SEQ ID NO: 35, the HVR-H1 comprises the amino acid sequence of SEQ ID NO: 49, the HVR-H2 comprises the amino acid sequence of SEQ ID NO: 67, and the HVR-H3 comprises the amino acid sequence of SEQ ID NO: 86; (d) the HVR-L1 comprises the amino acid sequence of SEQ ID NO: 12, the HVR-L2 comprises the amino acid sequence of SEQ ID NO: 26, the HVR-L3 comprises the amino acid sequence of SEQ ID NO: 37, the HVR-H1 comprises the amino acid sequence of SEQ ID NO: 50, the HVR-H2 comprises the amino acid sequence of SEQ ID NO: 68, and the HVR-H3 comprises the amino acid sequence of SEQ ID NO: 87; (e) the HVR-L1 comprises the amino acid sequence of SEQ ID NO: 11, the HVR-L2 comprises the amino acid sequence of SEQ ID NO: 26, the HVR-L3 comprises the amino acid sequence of SEQ ID NO: 36, the HVR-H1 comprises the amino acid sequence of SEQ ID NO: 51, the HVR-H2 comprises the amino acid sequence of SEQ ID NO: 69, and the HVR-H3 comprises the amino acid sequence of SEQ ID NO: 88; (f) the HVR-L1 comprises the amino acid sequence of SEQ ID NO: 13, the HVR-L2 comprises the amino acid sequence of SEQ ID NO: 27, the HVR-L3 comprises the amino acid sequence of SEQ ID NO: 38, the HVR-H1 comprises the amino acid sequence of SEQ ID NO: 52, the HVR-H2 comprises the amino acid sequence of SEQ ID NO: 70, and the HVR-H3 comprises the amino acid sequence of SEQ ID NO: 89; (g) the HVR-L1 comprises the amino acid sequence of SEQ ID NO: 14, the HVR-L2 comprises the amino acid sequence of SEQ ID NO: 28, the HVR-L3 comprises the amino acid sequence of SEQ ID NO: 39, the HVR-H1 comprises the amino acid sequence of SEQ ID NO: 53, the HVR-H2 comprises the amino acid sequence of SEQ ID NO: 71, and the HVR-H3 comprises the amino acid sequence of SEQ ID NO: 90; (h) the HVR-L1 comprises the amino acid sequence of SEQ ID NO: 13, the HVR-L2 comprises the amino acid sequence of SEQ ID NO: 27, the HVR-L3 comprises the amino acid sequence of SEQ ID NO: 38, the HVR-H1 comprises the amino acid sequence of SEQ ID NO: 52, the HVR-H2 comprises the amino acid sequence of SEQ ID NO: 70, and the HVR-H3 comprises the amino acid sequence of SEQ ID NO: 89; (i) the HVR-L1 comprises the amino acid sequence of SEQ ID NO: 13, the HVR-L2 comprises the amino acid sequence of SEQ ID NO: 27, the HVR-L3 comprises the amino acid sequence of SEQ ID NO: 38, the HVR-H1 comprises the amino acid sequence of SEQ ID NO: 52, the HVR-H2 comprises the amino acid sequence of SEQ ID NO: 70, and the HVR-H3 comprises the amino acid sequence of SEQ ID NO: 89; (j) the HVR-L1 comprises the amino acid sequence of SEQ ID NO: 15, the HVR-L2 comprises the amino acid sequence of SEQ ID NO: 28, the HVR-L3 comprises the amino acid sequence of SEQ ID NO: 40, the HVR-H1 comprises the amino acid sequence of SEQ ID NO: 54, the HVR-H2 comprises the amino acid sequence of SEQ ID NO: 72, and the HVR-H3 comprises the amino acid sequence of SEQ ID NO: 91; (k) the HVR-L1 comprises the amino acid sequence of SEQ ID NO: 11, the HVR-L2 comprises the amino acid sequence of SEQ ID NO: 26, the HVR-L3 comprises the amino acid sequence of SEQ ID NO: 36, the HVR-H1 comprises the amino acid sequence of SEQ ID NO: 51, the HVR-H2 comprises the amino acid sequence of SEQ ID NO: 69, and the HVR-H3 comprises the amino acid sequence of SEQ ID NO: 88; (1) the HVR-L1 comprises the amino acid sequence of SEQ ID NO: 16, the HVR-L2 comprises the amino acid sequence of SEQ ID NO: 29, the HVR-L3 comprises the amino acid sequence of SEQ ID NO: 35, the HVR-H1 comprises the amino acid sequence of SEQ ID NO: 55, the HVR-H2 comprises the amino acid sequence of SEQ ID NO: 73, and the HVR-H3 comprises the amino acid sequence of SEQ ID NO: 92; (m) the HVR-L1 comprises the amino acid sequence of SEQ ID NO: 15, the HVR-L2 comprises the amino acid sequence of SEQ ID NO: 28, the HVR-L3 comprises the amino acid sequence of SEQ ID NO: 40, the HVR-H1 comprises the amino acid sequence of SEQ ID NO: 54, the HVR-H2 comprises the amino acid sequence of SEQ ID NO: 72, and the HVR-H3 comprises the amino acid sequence of SEQ ID NO: 91; (n) the HVR-L1 comprises the amino acid sequence of SEQ ID NO: 581, the HVR-L2 comprises the amino acid sequence of SEQ ID NO: 29, the HVR-L3 comprises the amino acid sequence of SEQ ID NO: 582, the HVR-H1 comprises the amino acid sequence of SEQ ID NO: 56, the HVR-H2 comprises the amino acid sequence of SEQ ID NO: 74, and the HVR-H3 comprises the amino acid sequence of SEQ ID NO: 93; (o) the HVR-L1 comprises the amino acid sequence of SEQ ID NO: 17, the HVR-L2 comprises the amino acid sequence of SEQ ID NO: 30, the HVR-L3 comprises the amino acid sequence of SEQ ID NO: 41, the HVR-H1 comprises the amino acid sequence of SEQ ID NO: 57, the HVR-H2 comprises the amino acid sequence of SEQ ID NO: 75, and the HVR-H3 comprises the amino acid sequence of SEQ ID NO: 94; (p) the HVR-H1 comprises the amino acid sequence of SEQ ID NO: 58, the HVR-H2 comprises the amino acid sequence of SEQ ID NO: 76, and the HVR-H3 comprises the amino acid sequence of SEQ ID NO: 95; (q) the HVR-L1 comprises the amino acid sequence of SEQ ID NO: 18, the HVR-L2 comprises the amino acid sequence of SEQ ID NO: 31, the HVR-L3 comprises the amino acid sequence of SEQ ID NO: 42, the HVR-H1 comprises the amino acid sequence of SEQ ID NO: 59, the HVR-H2 comprises the amino acid sequence of SEQ ID NO: 77, and the HVR-H3 comprises the amino acid sequence of SEQ ID NO: 96; (r) the HVR-L1 comprises the amino acid sequence of SEQ ID NO: 19, the HVR-L2 comprises the amino acid sequence of SEQ ID NO: 28, the HVR-L3 comprises the amino acid sequence of SEQ ID NO: 43, the HVR-H1 comprises the amino acid sequence of SEQ ID NO: 60, the HVR-H2 comprises the amino acid sequence of SEQ ID NO: 78, and the HVR-H3 comprises the amino acid sequence of SEQ ID NO: 97; (s) the HVR-L1 comprises the amino acid sequence of SEQ ID NO: 20, the HVR-L2 comprises the amino acid sequence of SEQ ID NO: 28, the HVR-L3 comprises the amino acid sequence of SEQ ID NO: 44, the HVR-H1 comprises the amino acid sequence of SEQ ID NO: 61, the HVR-H2 comprises the amino acid sequence of SEQ ID NO: 79, and the HVR-H3 comprises the amino acid sequence of SEQ ID NO: 98; (t) the HVR-L1 comprises the amino acid sequence of SEQ ID NO: 21, the HVR-L2 comprises the amino acid sequence of SEQ ID NO: 32, the HVR-L3 comprises the amino acid sequence of SEQ ID NO: 45, the HVR-H1 comprises the amino acid sequence of SEQ ID NO: 62, the HVR-H2 comprises the amino acid sequence of SEQ ID NO: 80, and the HVR-H3 comprises the amino acid sequence of SEQ ID NO: 99; (u) the HVR-L1 comprises the amino acid sequence of SEQ ID NO: 15, the HVR-L2 comprises the amino acid sequence of SEQ ID NO: 33, the HVR-L3 comprises the amino acid sequence of SEQ ID NO: 40, the HVR-H1 comprises the amino acid sequence of SEQ ID NO: 54, the HVR-H2 comprises the amino acid sequence of SEQ ID NO: 81, and the HVR-H3 comprises the amino acid sequence of SEQ ID NO: 91; (v) the HVR-L1 comprises the amino acid sequence of SEQ ID NO: 22, the HVR-L2 comprises the amino acid sequence of SEQ ID NO: 29, the HVR-L3 comprises the amino acid sequence of SEQ ID NO: 46, the HVR-H1 comprises the amino acid sequence of SEQ ID NO: 63, the HVR-H2 comprises the amino acid sequence of SEQ ID NO: 82, and the HVR-H3 comprises the amino acid sequence of SEQ ID NO: 100; (w) the HVR-L1 comprises the amino acid sequence of SEQ ID NO: 23, the HVR-L2 comprises the amino acid sequence of SEQ ID NO: 29, the HVR-L3 comprises the amino acid sequence of SEQ ID NO: 47, the HVR-H1 comprises the amino acid sequence of SEQ ID NO: 64, the HVR-H2 comprises the amino acid sequence of SEQ ID NO: 83, and the HVR-H3 comprises the amino acid sequence of SEQ ID NO: 101; (x) the HVR-L1 comprises the amino acid sequence of SEQ ID NO: 16, the HVR-L2 comprises the amino acid sequence of SEQ ID NO: 29, the HVR-L3 comprises the amino acid sequence of SEQ ID NO: 35, the HVR-H1 comprises the amino acid sequence of SEQ ID NO: 65, the HVR-H2 comprises the amino acid sequence of SEQ ID NO: 84, and the HVR-H3 comprises the amino acid sequence of SEQ ID NO: 102, (y) the HVR-L1 comprises the amino acid sequence of SEQ ID NO: 581, the HVR-L2 comprises the amino acid sequence of SEQ ID NO: 29, the HVR-L3 comprises the amino acid sequence of SEQ ID NO: 582, the HVR-H1 comprises the amino acid sequence of SEQ ID NO: 56, the HVR-H2 comprises the amino acid sequence of SEQ ID NO: 585, and the HVR-H3 comprises the amino acid sequence of SEQ ID NO: 588, (z) the HVR-L1 comprises the amino acid sequence of SEQ ID NO: 10, the HVR-L2 comprises the amino acid sequence of SEQ ID NO: 29, the HVR-L3 comprises the amino acid sequence of SEQ ID NO: 35, the HVR-H1 comprises the amino acid sequence of SEQ ID NO: 49, the HVR-H2 comprises the amino acid sequence of SEQ ID NO: 586, and the HVR-H3 comprises the amino acid sequence of SEQ ID NO: 86, or (aa) the HVR-L1 comprises the amino acid sequence of SEQ ID NO: 14, the HVR-L2 comprises the amino acid sequence of SEQ ID NO: 28, the HVR-L3 comprises the amino acid sequence of SEQ ID NO: 583, the HVR-H1 comprises the amino acid sequence of SEQ ID NO: 584, the HVR-H2 comprises the amino acid sequence of SEQ ID NO: 587, and the HVR-H3 comprises the amino acid sequence of SEQ ID NO: 589.

[0228] In some embodiments, anti-TREM2 antibodies of the present disclosure comprise at least one, two, three, four, five, or six HVRs selected from (i) HVR-L1 comprising an amino acid sequence selected from SEQ ID NOs: 826-828, or an amino acid sequence with at least about 90% homology to an amino acid sequence selected from SEQ ID NOs: 826-828; (ii) HVR-L2 comprising the amino acid sequence of any of the HVR-L2 sequences listed in Tables 2A, 2B, 3A, 3B, 4A, 4B, 7A, and 7B, or from an antibody selected from 1A7, 3A2, 3B10, 6G12, 6H6, 7A9, 7B3, 8A1, 8E10, 8F11, 8F8, 9F5, 9G1, 9G3, 10A9, 10C1, 11A8, 12E2, 12F9, 12G6, 2C7, 2F5, 3C1, 4D7, 4D11, 6C11, 6G12, 7A3, 7C5, 7E9, 7F6, 7G1, 7H1, 8C3, 8F10, 12A1, 1E9, 2C5, 3C5, 4C12, 4F2, 5A2, 6B3, 7D1, 7D9, 11D8, 8A12, 10E7, 10B11, 10D2, 7D5, 2A7, 3G12, 6H9, 8G9, 9B4, 10A1, 11A8, 12F3, 2F8, 10E3, 1H7, 2F6, 2H8, 3A7, 7E5, 7F8, 11H5, 7C5, 4F11, 12D9, 1B4v1, 1B4v2, 6H2, 7B11v1, 7B11v2, 18D8, 18E4v1, 18E4v2, 29F6v1, 29F6v2, 40D5v1, 40D5v2, 43B9, 44A8v1, 44A8v2, 44B4v1, and 44B4v2; (iii) HVR-L3 comprising the amino acid sequence of any of the HVR-L3 sequences listed in Tables 2A, 2B, 3A, 3B, 4A, 4B, 7A, and 7B, or from an antibody selected from 1A7, 3A2, 3B10, 6G12, 6H6, 7A9, 7B3, 8A1, 8E10, 8F11, 8F8, 9F5, 9G1, 9G3, 10A9, 10C1, 11A8, 12E2, 12F9, 12G6, 2C7, 2F5, 3C1, 4D7, 4D11, 6C11, 6G12, 7A3, 7C5, 7E9, 7F6, 7G1, 7H1, 8C3, 8F10, 12A1, 1E9, 2C5, 3C5, 4C12, 4F2, 5A2, 6B3, 7D1, 7D9, 11D8, 8A12, 10E7, 10B11, 10D2, 7D5, 2A7, 3G12, 6H9, 8G9, 9B4, 10A1, 11A8, 12F3, 2F8, 10E3, 1H7, 2F6, 2H8, 3A7, 7E5, 7F8, 11H5, 7C5, 4F11, 12D9, 1B4v1, 1B4v2, 6H2, 7B11v1, 7B11v2, 18D8, 18E4v1, 18E4v2, 29F6v1, 29F6v2, 40D5v1, 40D5v2, 43B9, 44A8v1, 44A8v2, 44B4v1, and 44B4v2; (iv) HVR-H1 comprising an amino acid sequence selected from SEQ ID NOs: 829-835, or an amino acid sequence with at least about 90% homology to an amino acid sequence selected from SEQ ID NOs: 829-835; (v) HVR-H2 comprising an amino acid sequence selected from SEQ ID NOs: 836-842, or an amino acid sequence with at least about 90% homology to an amino acid sequence selected from SEQ ID NOs: 836-842; and (vi) HVR-H3 comprising the amino acid sequence of any of the HVR-H3 sequences listed in Tables 2A, 2B, 3A, 3B, 4A, 4B, 7A, and 7B, or from an antibody selected from 1A7, 3A2, 3B10, 6G12, 6H6, 7A9, 7B3, 8A1, 8E10, 8F11, 8F8, 9F5, 9G1, 9G3, 10A9, 10C1, 11A8, 12E2, 12F9, 12G6, 2C7, 2F5, 3C1, 4D7, 4D11, 6C11, 6G12, 7A3, 7C5, 7E9, 7F6, 7G1, 7H1, 8C3, 8F10, 12A1, 1E9, 2C5, 3C5, 4C12, 4F2, 5A2, 6B3, 7D1, 7D9, 11D8, 8A12, 10E7, 10B11, 10D2, 7D5, 2A7, 3G12, 6H9, 8G9, 9B4, 10A1, 11A8, 12F3, 2F8, 10E3, 1H7, 2F6, 2H8, 3A7, 7E5, 7F8, 11H5, 7C5, 4F11, 12D9, 1B4v1, 1B4v2, 6H2, 7B11v1, 7B11v2, 18D8, 18E4v1, 18E4v2, 29F6v1, 29F6v2, 40D5v1, 40D5v2, 43B9, 44A8v1, 44A8v2, 44B4v1, and 44B4v2.

[0229] In some embodiments, anti-TREM2 antibodies of the present disclosure comprise a light chain variable domain and a heavy chain variable domain, wherein the light chain variable domain comprises one or more of: (a) an HVR-L1 comprising an amino acid sequence selected from SEQ ID NOs: 9-23, 581, 690-694, 734-738, and 826-828, or an amino acid sequence with at least about 90% homology to an amino acid sequence selected from SEQ ID NOs: 9-23, 581, 690-694, 734-738, and 826-828; (b) an HVR-L2 comprising an amino acid sequence selected from SEQ ID NOs: 24-33, 695-697, and 739-743, or an amino acid sequence with at least about 90% homology to an amino acid sequence selected from SEQ ID NOs: 24-33, 695-697, and 739-743; and (c) an HVR-L3 comprising an amino acid sequence selected from SEQ ID NOs: 34-47, 582, 583, 698-702, and 744-746, or an amino acid sequence with at least about 90% homology to an amino acid sequence selected from SEQ ID NOs: 34-47, 582, 583, 698-702, and 744-746; and/or wherein the heavy chain variable domain comprises one or more of: (a) an HVR-H1 comprising an amino acid sequence selected from SEQ ID NOs: 48-65, 584, 703-705, 747-754, and 829-835, or an amino acid sequence with at least about 90% homology to an amino acid sequence selected from SEQ ID NOs: 48-65, 584, 703-705, 747-754, and 829-835; (b) an HVR-H2 comprising an amino acid sequence selected from SEQ ID NOs: 66-84, 585-587, 706-708, 755-762, 836-842, and 888, or an amino acid sequence with at least about 90% homology to an amino acid sequence selected from SEQ ID NOs: 66-84, 585-587, 706-708, 755-762, 836-842, and 888; and (c) an HVR-H3 comprising an amino acid sequence selected from SEQ ID NOs: 85-102, 588, 589, 709, 710, and 763-770, or an amino acid sequence with at least about 90% homology to an amino acid sequence selected from SEQ ID NOs: 85-102, 588, 589, 709, 710, and 763-770.

[0230] In some embodiments, anti-TREM2 antibodies of the present disclosure comprise a light chain variable region of any one of the antibodies listed in Tables 2A, 2B, 3A, 3B, 4A, 4B, 7A, and 7B, or selected from 1A7, 3A2, 3B10, 6G12, 6H6, 7A9, 7B3, 8A1, 8E10, 8F11, 8F8, 9F5, 9F5v2, 9G1, 9G3, 10A9, 10C1, 11A8, 12E2, 12F9, 12G6, 2C7, 2F5, 3C1, 4D7, 4D11, 6C11, 6G12, 7A3, 7C5, 7E9, 7F6, 7G1, 7H1, 8C3, 8F10, 12A1, 1E9, 2C5, 3C5, 4C12, 4F2, 5A2, 6B3, 7D1, 7D9, 11D8, 8A12, 10E7, 10B11, 10D2, 7D5, 2A7, 3G12, 6H9, 8G9, 9B4, 10A1, 11A8, 12F3, 2F8, 10E3, 1H7, 2F6, 2H8, 3A7, 7E5, 7E5v2, 7F8, 11H5, 7C5, 4F11, 12D9, 1B4v1, 1B4v2, 6H2, 7B11v1, 7B11v2, 18D8, 18E4v1, 18E4v2, 29F6v1, 29F6v2, 40D5v1, 40D5v2, 43B9, 44A8v1, 44A8v2, 44B4v1, and 44B4v2; and/or a heavy chain variable region of any one of the antibodies listed in Tables 2A, 2B, 3A, 3B, 4A, 4B, 7A, and 7B, or selected from 1A7, 3A2, 3B10, 6G12, 6H6, 7A9, 7B3, 8A1, 8E10, 8F11, 8F8, 9F5, 9G1, 9G3, 10A9, 10C1, 11A8, 12E2, 12F9, 12G6, 2C7, 2F5, 3C1, 4D7, 4D11, 6C11, 6G12, 7A3, 7C5, 7E9, 7F6, 7G1, 7H1, 8C3, 8F10, 12A1, 1E9, 2C5, 3C5, 4C12, 4F2, 5A2, 6B3, 7D1, 7D9, 11D8, 8A12, 10E7, 10B11, 10D2, 7D5, 2A7, 3G12, 6H9, 8G9, 9B4, 10A1, 11A8, 12F3, 2F8, 10E3, 1H7, 2F6, 2H8, 3A7, 7E5, 7F8, 11H5, 7C5, 4F11, 12D9, 1B4v1, 1B4v2, 6H2, 7B11v1, 7B11v2, 18D8, 18E4v1, 18E4v2, 29F6v1, 29F6v2, 40D5v1, 40D5v2, 43B9, 44A8v1, 44A8v2, 44B4v1, and 44B4v2. In some embodiments, anti-TREM2 antibodies of the present disclosure comprise a light chain variable region comprising an amino acid sequence selected from any of SEQ ID NOs: 219-398, 602-634, 679-689, 724-730, 809-816, 821, 843, 844, 849, and 850; and/or a heavy chain variable domain comprising an amino acid sequence selected from any of SEQ ID NOs: 399-580, 635-678, 731-733, and 817-820, 822-825, and 845-847. In some embodiments, the antibody comprises a light chain variable domain comprising the amino acid sequence of SEQ ID NO:843 and a heavy chain variable domain comprising the amino acid sequence of SEQ ID NO:845. In some embodiments, the antibody comprises a light chain variable domain comprising the amino acid sequence of SEQ ID NO:843 and a heavy chain variable domain comprising the amino acid sequence of SEQ ID NO:846. In some embodiments, the antibody comprises a light chain variable domain comprising the amino acid sequence of SEQ ID NO:843 and a heavy chain variable domain comprising the amino acid sequence of SEQ ID NO:847. In some embodiments, the antibody comprises a light chain variable domain comprising the amino acid sequence of SEQ ID NO:844 and a heavy chain variable domain comprising the amino acid sequence of SEQ ID NO:845. In some embodiments, the antibody comprises a light chain variable domain comprising the amino acid sequence of SEQ ID NO:844 and a heavy chain variable domain comprising the amino acid sequence of SEQ ID NO:846. In some embodiments, the antibody comprises a light chain variable domain comprising the amino acid sequence of SEQ ID NO:844 and a heavy chain variable domain comprising the amino acid sequence of SEQ ID NO:847. In some embodiments, the antibody comprises a light chain variable domain and a heavy chain variable domain, wherein: (a) the light chain variable domain comprises the amino acid sequence of SEQ ID NO: 333 and the heavy chain variable domain comprises the amino acid sequence of SEQ ID NO:521; (b) the light chain variable domain comprises the amino acid sequence of SEQ ID NO: 850 and the heavy chain variable domain comprises the amino acid sequence of SEQ ID NO:521; (c) the light chain variable domain comprises the amino acid sequence of SEQ ID NO: 334 and the heavy chain variable domain comprises the amino acid sequence of SEQ ID NO:522; (d) the light chain variable domain comprises the amino acid sequence of SEQ ID NO: 335 and the heavy chain variable domain comprises the amino acid sequence of SEQ ID NO:523; (e) the light chain variable domain comprises the amino acid sequence of SEQ ID NO: 336 and the heavy chain variable domain comprises the amino acid sequence of SEQ ID NO:524; (f) the light chain variable domain comprises the amino acid sequence of SEQ ID NO: 337 and the heavy chain variable domain comprises the amino acid sequence of SEQ ID NO:525; (g) the light chain variable domain comprises the amino acid sequence of SEQ ID NO: 338 and the heavy chain variable domain comprises the amino acid sequence of SEQ ID NO:526; (h) the light chain variable domain comprises the amino acid sequence of SEQ ID NO: 339 and the heavy chain variable domain comprises the amino acid sequence of SEQ ID NO:526; (i) the light chain variable domain comprises the amino acid sequence of SEQ ID NO: 340 and the heavy chain variable domain comprises the amino acid sequence of SEQ ID NO:527; (j) the light chain variable domain comprises the amino acid sequence of SEQ ID NO: 341 and the heavy chain variable domain comprises the amino acid sequence of SEQ ID NO:528; (k) the light chain variable domain comprises the amino acid sequence of SEQ ID NO: 342 and the heavy chain variable domain comprises the amino acid sequence of SEQ ID NO:529; (1) the light chain variable domain comprises the amino acid sequence of SEQ ID NO: 343 and the heavy chain variable domain comprises the amino acid sequence of SEQ ID NO:530; (m) the light chain variable domain comprises the amino acid sequence of SEQ ID NO: 843 and the heavy chain variable domain comprises the amino acid sequence of SEQ ID NO:845; (n) the light chain variable domain comprises the amino acid sequence of SEQ ID NO: 844 and the heavy chain variable domain comprises the amino acid sequence of SEQ ID NO:846; (o) the light chain variable domain comprises the amino acid sequence of SEQ ID NO:844 and the heavy chain variable domain comprises the amino acid sequence of SEQ ID NO:847; (p) the light chain variable domain comprises the amino acid sequence of SEQ ID NO: 219 and the heavy chain variable domain comprises the amino acid sequence of SEQ ID NO:399; (q) the light chain variable domain comprises the amino acid sequence of SEQ ID NO: 230 and the heavy chain variable domain comprises the amino acid sequence of SEQ ID NO:409; (r) the light chain variable domain comprises the amino acid sequence of SEQ ID NO: 252 and the heavy chain variable domain comprises the amino acid sequence of SEQ ID NO:419; (s) the light chain variable domain comprises the amino acid sequence of SEQ ID NO: 241 and the heavy chain variable domain comprises the amino acid sequence of SEQ ID NO:429; (t) the light chain variable domain comprises the amino acid sequence of SEQ ID NO: 849 and the heavy chain variable domain comprises the amino acid sequence of SEQ ID NO:429; (u) the light chain variable domain comprises the amino acid sequence of SEQ ID NO: 263 and the heavy chain variable domain comprises the amino acid sequence of SEQ ID NO:439; (v) the light chain variable domain comprises the amino acid sequence of SEQ ID NO: 274 and the heavy chain variable domain comprises the amino acid sequence of SEQ ID NO:449; (w) the light chain variable domain comprises the amino acid sequence of SEQ ID NO:285 and the heavy chain variable domain comprises the amino acid sequence of SEQ ID NO:459; (x) the light chain variable domain comprises the amino acid sequence of SEQ ID NO:286 and the heavy chain variable domain comprises the amino acid sequence of SEQ ID NO:460; (y) the light chain variable domain comprises the amino acid sequence of SEQ ID NO: 287 and the heavy chain variable domain comprises the amino acid sequence of SEQ ID NO:461; (z) the light chain variable domain comprises the amino acid sequence of SEQ ID NO: 298 and the heavy chain variable domain comprises the amino acid sequence of SEQ ID NO:429; (aa) the light chain variable domain comprises the amino acid sequence of SEQ ID NO:299 and the heavy chain variable domain comprises the amino acid sequence of SEQ ID NO:471; (bb) the light chain variable domain comprises the amino acid sequence of SEQ ID NO: 310 and the heavy chain variable domain comprises the amino acid sequence of SEQ ID NO:461; (cc) the light chain variable domain comprises the amino acid sequence of SEQ ID NO: 679 and the heavy chain variable domain comprises the amino acid sequence of SEQ ID NO:481; (dd) the light chain variable domain comprises the amino acid sequence of SEQ ID NO: 311 and the heavy chain variable domain comprises the amino acid sequence of SEQ ID NO:491; (ee) the light chain variable domain comprises the amino acid sequence of SEQ ID NO: 322 and the heavy chain variable domain comprises the amino acid sequence of SEQ ID NO:511; (ff) the light chain variable domain comprises the amino acid sequence of SEQ ID NO: 344 and the heavy chain variable domain comprises the amino acid sequence of SEQ ID NO:531; (gg) the light chain variable domain comprises the amino acid sequence of SEQ ID NO: 355 and the heavy chain variable domain comprises the amino acid sequence of SEQ ID NO:635; (hh) the light chain variable domain comprises the amino acid sequence of SEQ ID NO: 365 and the heavy chain variable domain comprises the amino acid sequence of SEQ ID NO:541; (ii) the light chain variable domain comprises the amino acid sequence of SEQ ID NO: 376 and the heavy chain variable domain comprises the amino acid sequence of SEQ ID NO:551; (jj) the light chain variable domain comprises the amino acid sequence of SEQ ID NO: 387 and the heavy chain variable domain comprises the amino acid sequence of SEQ ID NO:561; (kk) the light chain variable domain comprises the amino acid sequence of SEQ ID NO: 398 and the heavy chain variable domain comprises the amino acid sequence of SEQ ID NO:571; (11) the light chain variable domain comprises the amino acid sequence of SEQ ID NO: 724 and the heavy chain variable domain comprises the amino acid sequence of SEQ ID NO:731; (mm) the light chain variable domain comprises the amino acid sequence of SEQ ID NO: 809 and the heavy chain variable domain comprises the amino acid sequence of SEQ ID NO:731; (nn) the light chain variable domain comprises the amino acid sequence of SEQ ID NO: 725 and the heavy chain variable domain comprises the amino acid sequence of SEQ ID NO:732; (oo) the light chain variable domain comprises the amino acid sequence of SEQ ID NO: 726 and the heavy chain variable domain comprises the amino acid sequence of SEQ ID NO:731; (pp) the light chain variable domain comprises the amino acid sequence of SEQ ID NO: 726 and the heavy chain variable domain comprises the amino acid sequence of SEQ ID NO:817; (qq) the light chain variable domain comprises the amino acid sequence of SEQ ID NO: 727 and the heavy chain variable domain comprises the amino acid sequence of SEQ ID NO:731; (rr) the light chain variable domain comprises the amino acid sequence of SEQ ID NO: 728 and the heavy chain variable domain comprises the amino acid sequence of SEQ ID NO:733; (ss) the light chain variable domain comprises the amino acid sequence of SEQ ID NO:810 and the heavy chain variable domain comprises the amino acid sequence of SEQ ID NO:818; (tt) the light chain variable domain comprises the amino acid sequence of SEQ ID NO:811 and the heavy chain variable domain comprises the amino acid sequence of SEQ ID NO:733; (uu) the light chain variable domain comprises the amino acid sequence of SEQ ID NO:729 and the heavy chain variable domain comprises the amino acid sequence of SEQ ID NO:731; (vv) the light chain variable domain comprises the amino acid sequence of SEQ ID NO:812 and the heavy chain variable domain comprises the amino acid sequence of SEQ ID NO:819; (ww) the light chain variable domain comprises the amino acid sequence of SEQ ID NO:729 and the heavy chain variable domain comprises the amino acid sequence of SEQ ID NO:820; (xx) the light chain variable domain comprises the amino acid sequence of SEQ ID NO: 730 and the heavy chain variable domain comprises the amino acid sequence of SEQ ID NO:731; (yy) the light chain variable domain comprises the amino acid sequence of SEQ ID NO:813 and the heavy chain variable domain comprises the amino acid sequence of SEQ ID NO:731; (zz) the light chain variable domain comprises the amino acid sequence of SEQ ID NO:814 and the heavy chain variable domain comprises the amino acid sequence of SEQ ID NO:822; (aaa) the light chain variable domain comprises the amino acid sequence of SEQ ID NO:815 and the heavy chain variable domain comprises the amino acid sequence of SEQ ID NO:824; or (bbb) the light chain variable domain comprises the amino acid sequence of SEQ ID NO:816 and the heavy chain variable domain comprises the amino acid sequence of SEQ ID NO:825.

[0231] Any of the antibodies of the present disclosure may be produced by a cell line. In some embodiments, the cell line may be a mammalian cell line. In certain embodiments, the cell line may be a hybridoma cell line. In other embodiments, the cell line may be a yeast cell line. Any cell line known in the art suitable for antibody production may be used to produce an antibody of the present disclosure. Exemplary cell lines for antibody production are described throughout the present disclosure.

[0232] In some embodiments, the anti-TREM2 antibody is an anti-TREM2 monoclonal antibody selected from 1A7, 3A2, 3B10, 6G12, 6H6, 7A9, 7B3, 8A1, 8E10, 8F11, 8F8, 9F5, 9G1, 9G3, 10A9, 10C1, 11A8, 12E2, 12F9, 12G6, 2C7, 2F5, 3C1, 4D7, 4D11, 6C11, 6G12, 7A3, 7C5, 7E9, 7F6, 7G1, 7H1, 8C3, 8F10, 12A1, 1E9, 2C5, 3C5, 4C12, 4F2, 5A2, 6B3, 7D1, 7D9, 11D8, 8A12, 10E7, 10B11, 10D2, 7D5, 2A7, 3G12, 6H9, 8G9, 9B4, 10A1, 11A8, 12F3, 2F8, 10E3, 1H7, 2F6, 2H8, 3A7, 7E5, 7F8, 11H5, 7C5, 4F11, 12D9, 1B4v1, 1B4v2, 6H2, 7B11v1, 7B11v2, 18D8, 18E4v1, 18E4v2, 29F6v1, 29F6v2, 40D5v1, 40D5v2, 43B9, 44A8v1, 44A8v2, 44B4v1, and 44B4v2, and humanized variants thereof. In certain embodiments, the anti-TREM2 antibody is an agonist antibody. In certain embodiments, the anti-TREM2 antibody is an inert antibody. In certain embodiments, the anti-TREM2 antibody is an antagonist antibody.

[0233] In some embodiments, the anti-TREM2 antibody is anti-TREM2 monoclonal antibody 7E5. In some embodiments, the anti-TREM2 antibody is an isolated antibody that binds essentially the same TREM2 epitope as 7E5. In some embodiments, the anti-TREM2 antibody is an isolated antibody comprising the HVR-H1, HVR-H2, and HVR-H3 of the heavy chain variable domain of monoclonal antibody 7E5. In some embodiments, the anti-TREM2 antibody is an isolated antibody comprising the HVR-L1, HVR-L2, and HVR-L3 of the light chain variable domain of monoclonal antibody 7E5. In some embodiments, the anti-TREM2 antibody is an isolated antibody comprising the HVR-H1, HVR-H2, and HVR-H3 of the heavy chain variable domain and the HVR-L1, HVR-L2, and HVR-L3 of the light chain variable domain of monoclonal antibody 7E5.

[0234] In some embodiments, the anti-TREM2 antibody is anti-TREM2 monoclonal antibody 9F5. In some embodiments, the anti-TREM2 antibody is an isolated antibody which binds essentially the same TREM2 epitope as 9F5. In some embodiments, the anti-TREM2 antibody is an isolated antibody comprising the HVR-H1, HVR-H2, and HVR-H3 of the heavy chain variable domain of monoclonal antibody 9F5. In some embodiments, the anti-TREM2 antibody is an isolated antibody comprising the HVR-L1, HVR-L2, and HVR-L3 of the light chain variable domain of monoclonal antibody 9F5. In some embodiments, the anti-TREM2 antibody is an isolated antibody comprising the HVR-H1, HVR-H2, and HVR-H3 of the heavy chain variable domain and the HVR-L1, HVR-L2, and HVR-L3 of the light chain variable domain of monoclonal antibody 9F5.

[0235] In some embodiments, the anti-TREM2 antibody is anti-TREM2 monoclonal antibody 3A7. In some embodiments, the anti-TREM2 antibody is an isolated antibody which binds essentially the same TREM2 epitope as 3A7. In some embodiments, the anti-TREM2 antibody is an isolated antibody comprising the HVR-H1, HVR-H2, and HVR-H3 of the heavy chain variable domain of monoclonal antibody 3A7. In some embodiments, the anti-TREM2 antibody is an isolated antibody comprising the HVR-L1, HVR-L2, and HVR-L3 of the light chain variable domain of monoclonal antibody 3A7. In some embodiments, the anti-TREM2 antibody is an isolated antibody comprising the HVR-H1, HVR-H2, and HVR-H3 of the heavy chain variable domain and the HVR-L1, HVR-L2, and HVR-L3 of the light chain variable domain of monoclonal antibody 3A7.

[0236] In some embodiments, the anti-TREM2 antibody is anti-TREM2 monoclonal antibody 4D11. In some embodiments, the anti-TREM2 antibody is an isolated antibody, which binds essentially the same TREM2 epitope as 4D11. In some embodiments, the anti-TREM2 antibody is an isolated antibody comprising the HVR-H1, HVR-H2, and HVR-H3 of the heavy chain variable domain of monoclonal antibody 4D11. In some embodiments, the anti-TREM2 antibody is an isolated antibody comprising the HVR-L1, HVR-L2, and HVR-L3 of the light chain variable domain of monoclonal antibody 4D11. In some embodiments, the anti-TREM2 antibody is an isolated antibody comprising the HVR-H1, HVR-H2, and HVR-H3 of the heavy chain variable domain and the HVR-L1, HVR-L2, and HVR-L3 of the light chain variable domain of monoclonal antibody 4D11.

[0237] In some embodiments, the anti-TREM2 antibody is anti-TREM2 monoclonal antibody 12F9. In some embodiments, the anti-TREM2 antibody is an isolated antibody which binds essentially the same TREM2 epitope as 12F9. In some embodiments, the anti-TREM2 antibody is an isolated antibody comprising the HVR-H1, HVR-H2, and HVR-H3 of the heavy chain variable domain of monoclonal antibody 12F9. In some embodiments, the anti-TREM2 antibody is an isolated antibody comprising the HVR-L1, HVR-L2, and HVR-L3 of the light chain variable domain of monoclonal antibody 12F9. In some embodiments, the anti-TREM2 antibody is an isolated antibody comprising the HVR-H1, HVR-H2, and HVR-H3 of the heavy chain variable domain and the HVR-L1, HVR-L2, and HVR-L3 of the light chain variable domain of monoclonal antibody 12F9.

[0238] In some embodiments, the anti-TREM2 antibody is anti-TREM2 monoclonal antibody 8F8. In some embodiments, the anti-TREM2 antibody is an isolated antibody which binds essentially the same TREM2 epitope as 8F8. In some embodiments, the anti-TREM2 antibody is an isolated antibody comprising the HVR-H1, HVR-H2, and HVR-H3 of the heavy chain variable domain of monoclonal antibody 8F8. In some embodiments, the anti-TREM2 antibody is an isolated antibody comprising the HVR-L1, HVR-L2, and HVR-L3 of the light chain variable domain of monoclonal antibody 8F8. In some embodiments, the anti-TREM2 antibody is an isolated antibody comprising the HVR-H1, HVR-H2, and HVR-H3 of the heavy chain variable domain and the HVR-L1, HVR-L2, and HVR-L3 of the light chain variable domain of monoclonal antibody 8F8.

[0239] In some embodiments, the anti-TREM2 antibody is anti-TREM2 monoclonal antibody 1B4. In some embodiments, the anti-TREM2 antibody is an isolated antibody which binds essentially the same TREM2 epitope as 1B4. In some embodiments, the anti-TREM2 antibody is an isolated antibody comprising the HVR-H1, HVR-H2, and HVR-H3 of the heavy chain variable domain of monoclonal antibody 1B4. In some embodiments, the anti-TREM2 antibody is an isolated antibody comprising the HVR-L1, HVR-L2, and HVR-L3 of the light chain variable domain of monoclonal antibody 1B4v1. In some embodiments, the anti-TREM2 antibody is an isolated antibody comprising the HVR-L1, HVR-L2, and HVR-L3 of the light chain variable domain of monoclonal antibody 1B4v2. In some embodiments, the anti-TREM2 antibody is an isolated antibody comprising the HVR-H1, HVR-H2, and HVR-H3 of the heavy chain variable domain of monoclonal antibody 1B4, and the HVR-L1, HVR-L2, and HVR-L3 of the light chain variable domain of monoclonal antibody 1B4v1. In some embodiments, the anti-TREM2 antibody is an isolated antibody comprising the HVR-H1, HVR-H2, and HVR-H3 of the heavy chain variable domain of monoclonal antibody 1B4, and the HVR-L1, HVR-L2, and HVR-L3 of the light chain variable domain of monoclonal antibody 1B4v2.

[0240] In some embodiments, the anti-TREM2 antibody is anti-TREM2 monoclonal antibody 6H2. In some embodiments, the anti-TREM2 antibody is an isolated antibody which binds essentially the same TREM2 epitope as 6H2. In some embodiments, the anti-TREM2 antibody is an isolated antibody comprising the HVR-H1, HVR-H2, and HVR-H3 of the heavy chain variable domain of monoclonal antibody 6H2. In some embodiments, the anti-TREM2 antibody is an isolated antibody comprising the HVR-L1, HVR-L2, and HVR-L3 of the light chain variable domain of monoclonal antibody 6H2. In some embodiments, the anti-TREM2 antibody is an isolated antibody comprising the HVR-H1, HVR-H2, and HVR-H3 of the heavy chain variable domain and the HVR-L1, HVR-L2, and HVR-L3 of the light chain variable domain of monoclonal antibody 6H2.

[0241] In some embodiments, the anti-TREM2 antibody is anti-TREM2 monoclonal antibody 7B11. In some embodiments, the anti-TREM2 antibody is an isolated antibody which binds essentially the same TREM2 epitope as 7B11. In some embodiments, the anti-TREM2 antibody is an isolated antibody comprising the HVR-H1, HVR-H2, and HVR-H3 of the heavy chain variable domain of monoclonal antibody 7B11v1. In some embodiments, the anti-TREM2 antibody is an isolated antibody comprising the HVR-H1, HVR-H2, and HVR-H3 of the heavy chain variable domain of monoclonal antibody 7B11v2. In some embodiments, the anti-TREM2 antibody is an isolated antibody comprising the HVR-L1, HVR-L2, and HVR-L3 of the light chain variable domain of monoclonal antibody 7B11. In some embodiments, the anti-TREM2 antibody is an isolated antibody comprising the HVR-H1, HVR-H2, and HVR-H3 of the heavy chain variable domain of monoclonal antibody 7B11v1, and the HVR-L1, HVR-L2, and HVR-L3 of the light chain variable domain of monoclonal antibody 7B11. In some embodiments, the anti-TREM2 antibody is an isolated antibody comprising the HVR-H1, HVR-H2, and HVR-H3 of the heavy chain variable domain of monoclonal antibody 7B11v2, and the HVR-L1, HVR-L2, and HVR-L3 of the light chain variable domain of monoclonal antibody 7B11.

[0242] In some embodiments, the anti-TREM2 antibody is anti-TREM2 monoclonal antibody 18D8. In some embodiments, the anti-TREM2 antibody is an isolated antibody which binds essentially the same TREM2 epitope as 18D8. In some embodiments, the anti-TREM2 antibody is an isolated antibody comprising the HVR-H1, HVR-H2, and HVR-H3 of the heavy chain variable domain of monoclonal antibody 18D8. In some embodiments, the anti-TREM2 antibody is an isolated antibody comprising the HVR-L1, HVR-L2, and HVR-L3 of the light chain variable domain of monoclonal antibody 18D8. In some embodiments, the anti-TREM2 antibody is an isolated antibody comprising the HVR-H1, HVR-H2, and HVR-H3 of the heavy chain variable domain and the HVR-L1, HVR-L2, and HVR-L3 of the light chain variable domain of monoclonal antibody 18D8.

[0243] In some embodiments, the anti-TREM2 antibody is anti-TREM2 monoclonal antibody 18E4v1. In some embodiments, the anti-TREM2 antibody is an isolated antibody which binds essentially the same TREM2 epitope as 18E4v1. In some embodiments, the anti-TREM2 antibody is an isolated antibody comprising the HVR-H1, HVR-H2, and HVR-H3 of the heavy chain variable domain of monoclonal antibody 18E4v1. In some embodiments, the anti-TREM2 antibody is an isolated antibody comprising the HVR-L1, HVR-L2, and HVR-L3 of the light chain variable domain of monoclonal antibody 18E4v1. In some embodiments, the anti-TREM2 antibody is an isolated antibody comprising the HVR-H1, HVR-H2, and HVR-H3 of the heavy chain variable domain and the HVR-L1, HVR-L2, and HVR-L3 of the light chain variable domain of monoclonal antibody 18E4v1.

[0244] In some embodiments, the anti-TREM2 antibody is anti-TREM2 monoclonal antibody 18E4v2. In some embodiments, the anti-TREM2 antibody is an isolated antibody which binds essentially the same TREM2 epitope as 18E4v2. In some embodiments, the anti-TREM2 antibody is an isolated antibody comprising the HVR-H1, HVR-H2, and HVR-H3 of the heavy chain variable domain of monoclonal antibody 18E4v2. In some embodiments, the anti-TREM2 antibody is an isolated antibody comprising the HVR-L1, HVR-L2, and HVR-L3 of the light chain variable domain of monoclonal antibody 18E4v2. In some embodiments, the anti-TREM2 antibody is an isolated antibody comprising the HVR-H1, HVR-H2, and HVR-H3 of the heavy chain variable domain and the HVR-L1, HVR-L2, and HVR-L3 of the light chain variable domain of monoclonal antibody 18E4v2.

[0245] In some embodiments, the anti-TREM2 antibody is anti-TREM2 monoclonal antibody 29F6v1. In some embodiments, the anti-TREM2 antibody is an isolated antibody which binds essentially the same TREM2 epitope as 29F6v1. In some embodiments, the anti-TREM2 antibody is an isolated antibody comprising the HVR-H1, HVR-H2, and HVR-H3 of the heavy chain variable domain of monoclonal antibody 29F6v1. In some embodiments, the anti-TREM2 antibody is an isolated antibody comprising the HVR-L1, HVR-L2, and HVR-L3 of the light chain variable domain of monoclonal antibody 29F6v1. In some embodiments, the anti-TREM2 antibody is an isolated antibody comprising the HVR-H1, HVR-H2, and HVR-H3 of the heavy chain variable domain and the HVR-L1, HVR-L2, and HVR-L3 of the light chain variable domain of monoclonal antibody 29F6v1.

[0246] In some embodiments, the anti-TREM2 antibody is anti-TREM2 monoclonal antibody 29F6v2. In some embodiments, the anti-TREM2 antibody is an isolated antibody which binds essentially the same TREM2 epitope as 29F6v2. In some embodiments, the anti-TREM2 antibody is an isolated antibody comprising the HVR-H1, HVR-H2, and HVR-H3 of the heavy chain variable domain of monoclonal antibody 29F6v2. In some embodiments, the anti-TREM2 antibody is an isolated antibody comprising the HVR-L1, HVR-L2, and HVR-L3 of the light chain variable domain of monoclonal antibody 29F6v2. In some embodiments, the anti-TREM2 antibody is an isolated antibody comprising the HVR-H1, HVR-H2, and HVR-H3 of the heavy chain variable domain and the HVR-L1, HVR-L2, and HVR-L3 of the light chain variable domain of monoclonal antibody 29F6v2.

[0247] In some embodiments, the anti-TREM2 antibody is anti-TREM2 monoclonal antibody 40D5. In some embodiments, the anti-TREM2 antibody is an isolated antibody which binds essentially the same TREM2 epitope as 40D5. In some embodiments, the anti-TREM2 antibody is an isolated antibody comprising the HVR-H1, HVR-H2, and HVR-H3 of the heavy chain variable domain of monoclonal antibody 40D5v1. In some embodiments, the anti-TREM2 antibody is an isolated antibody comprising the HVR-H1, HVR-H2, and HVR-H3 of the heavy chain variable domain of monoclonal antibody 40D5v2. In some embodiments, the anti-TREM2 antibody is an isolated antibody comprising the HVR-L1, HVR-L2, and HVR-L3 of the light chain variable domain of monoclonal antibody 40D5. In some embodiments, the anti-TREM2 antibody is an isolated antibody comprising the HVR-H1, HVR-H2, and HVR-H3 of the heavy chain variable domain of monoclonal antibody 40D5v1, and the HVR-L1, HVR-L2, and HVR-L3 of the light chain variable domain of monoclonal antibody 40D5. In some embodiments, the anti-TREM2 antibody is an isolated antibody comprising the HVR-H1, HVR-H2, and HVR-H3 of the heavy chain variable domain of monoclonal antibody 40D5v2, and the HVR-L1, HVR-L2, and HVR-L3 of the light chain variable domain of monoclonal antibody 40D5.

[0248] In some embodiments, the anti-TREM2 antibody is anti-TREM2 monoclonal antibody 43B9. In some embodiments, the anti-TREM2 antibody is an isolated antibody which binds essentially the same TREM2 epitope as 43B9. In some embodiments, the anti-TREM2 antibody is an isolated antibody comprising the HVR-H1, HVR-H2, and HVR-H3 of the heavy chain variable domain of monoclonal antibody 43B9. In some embodiments, the anti-TREM2 antibody is an isolated antibody comprising the HVR-L1, HVR-L2, and HVR-L3 of the light chain variable domain of monoclonal antibody 43B9. In some embodiments, the anti-TREM2 antibody is an isolated antibody comprising the HVR-H1, HVR-H2, and HVR-H3 of the heavy chain variable domain and the HVR-L1, HVR-L2, and HVR-L3 of the light chain variable domain of monoclonal antibody 43B9.

[0249] In some embodiments, the anti-TREM2 antibody is anti-TREM2 monoclonal antibody 44A8. In some embodiments, the anti-TREM2 antibody is an isolated antibody which binds essentially the same TREM2 epitope as 44A8. In some embodiments, the anti-TREM2 antibody is an isolated antibody comprising the HVR-H1, HVR-H2, and HVR-H3 of the heavy chain variable domain of monoclonal antibody 44A8. In some embodiments, the anti-TREM2 antibody is an isolated antibody comprising the HVR-L1, HVR-L2, and HVR-L3 of the light chain variable domain of monoclonal antibody 44A8v1. In some embodiments, the anti-TREM2 antibody is an isolated antibody comprising the HVR-L1, HVR-L2, and HVR-L3 of the light chain variable domain of monoclonal antibody 44A8v2. In some embodiments, the anti-TREM2 antibody is an isolated antibody comprising the HVR-H1, HVR-H2, and HVR-H3 of the heavy chain variable domain of monoclonal antibody 44A8, and the HVR-L1, HVR-L2, and HVR-L3 of the light chain variable domain of monoclonal antibody 44A8v1. In some embodiments, the anti-TREM2 antibody is an isolated antibody comprising the HVR-H1, HVR-H2, and HVR-H3 of the heavy chain variable domain of monoclonal antibody 44A8, and the HVR-L1, HVR-L2, and HVR-L3 of the light chain variable domain of monoclonal antibody 44A8v2.

[0250] In some embodiments, the anti-TREM2 antibody is anti-TREM2 monoclonal antibody 44B4v1. In some embodiments, the anti-TREM2 antibody is an isolated antibody which binds essentially the same TREM2 epitope as 44B4v1. In some embodiments, the anti-TREM2 antibody is an isolated antibody comprising the HVR-H1, HVR-H2, and HVR-H3 of the heavy chain variable domain of monoclonal antibody 44B4v1. In some embodiments, the anti-TREM2 antibody is an isolated antibody comprising the HVR-L1, HVR-L2, and HVR-L3 of the light chain variable domain of monoclonal antibody 44B4v1. In some embodiments, the anti-TREM2 antibody is an isolated antibody comprising the HVR-H1, HVR-H2, and HVR-H3 of the heavy chain variable domain and the HVR-L1, HVR-L2, and HVR-L3 of the light chain variable domain of monoclonal antibody 44B4v1.

[0251] In some embodiments, the anti-TREM2 antibody is anti-TREM2 monoclonal antibody 44B4v2. In some embodiments, the anti-TREM2 antibody is an isolated antibody which binds essentially the same TREM2 epitope as 44B4v2. In some embodiments, the anti-TREM2 antibody is an isolated antibody comprising the HVR-H1, HVR-H2, and HVR-H3 of the heavy chain variable domain of monoclonal antibody 44B4v2. In some embodiments, the anti-TREM2 antibody is an isolated antibody comprising the HVR-L1, HVR-L2, and HVR-L3 of the light chain variable domain of monoclonal antibody 44B4v2. In some embodiments, the anti-TREM2 antibody is an isolated antibody comprising the HVR-H1, HVR-H2, and HVR-H3 of the heavy chain variable domain and the HVR-L1, HVR-L2, and HVR-L3 of the light chain variable domain of monoclonal antibody 44B4v2.

[0252] In some embodiments, anti-TREM2 antibodies of the present disclosure do not compete with one or more TREM2 ligands for binding to TREM2. In some embodiments, anti-TREM2 antibodies of the present disclosure are capable of binding TREM2 without blocking simultaneous binding of one or moreTREM2 ligands to TREM2. In some embodiments anti-TREM2 antibodies of the present disclosure are capable of additive and/or synergistic functional interactions with one or more TREM2 ligands. In some embodiments, anti-TREM2 antibodies of the present disclosure increase the maximal activity of TREM2 exposed to saturating concentrations of one or more TREM2 ligands. In some embodiments, anti-TREM2 antibodies of the present disclosure increase the activity of TREM2 obtained at any concentration of one or more TREM2 ligands.

[0253] Anti-TREM2 Antibody Binding Affinity

[0254] The dissociation constants (K_{D}) of anti-TREM2 antibodies for human TREM2 and mouse TREM2 may be less than 15 nM, less than 14.5 nM, less than 14 nM, less than 13.5 nM, less than 13 nM, less than 12.9 nM, less than 12.8 nM, less than 12.7 nM, less than 12.6 nM, less than 12.5 nM, less than 12.4 nM, less than 12.3 nM, less than 12.2 nM, less than 12.1 nM, less than 12 nM, less than 11.5 nM, less than 11 nM, less than 10.9 nM, less than 10.8 nM, less than 10.7 nM, less than 10.6 nM, less than 10.5 nM, less than 10.4 nM, less than 10.3 nM, less than 10.2 nM, less than 10.1 nM, less than 10 nM, less than 9.5 nM, less than 9 nM, less than 8.5 nM, less than 8 nM, less than 7.5 nM, less than 7 nM, less than 6.9 nM, less than 6.8 nM, less than 6.7 nM, less than 6.6 nM, less than 6.5 nM, less than 6.4 nM, less than 6.3 nM, less than 6.2 nM, less than 6.1 nM, less than 6 nM, less than 5.5 nM, less than 5 nM, less than 4.5 nM, less than 4 nM, less than 3.5 nM, less than 3.4 nM, less than 3.3 nM, less than 3.2 nM, less than 3.1 nM, less than 3 nM, less than 2.9 nM, less than 2.8 nM, less than 2.7 nM, less than 2.6 nM, less than 2.5 nM, less than 2.4 nM, less than 2.3 nM, less than 2.2 nM, less than 2.1 nM, less than 2 nM, less than 1.9 nM, less than 1.8 nM, less than 1.7 nM, less than 1.6 nM, less than 1.5 nM, less than 1.4 nM, less than 1.3 nM, less than 1.2 nM, less than 1.1 nM, less than 1 nM, less than 0.95 nM, or less than 0.9 nM. In some embodiments, dissociation constants range from about 12.8 nM to about 1.2 nM, or less than 1.2 nM. In some embodiments, dissociation constants of anti-TREM2 antibodies for human TREM2 range from about 12.8 nM to about 2.9 nM, or less than 2.9 nM. In some embodiments, dissociation constants of anti-TREM2 antibodies for mouse TREM2 range from about 10.4 nM to about 1.2 nM, or less than 1.2 nM.

[0255] In some embodiments, anti-TREM2 antibodies of the present disclosure increase memory and/or reduce cognitive deficit when administered to an individual. In some embodiments, anti-TREM2 antibodies of the present disclosure do not inhibit the growth of one or more innate immune cells. In some embodiments, anti-TREM2 antibodies of the present disclosure bind to one or more primary immune cells with a K_{D} of less than 50 nM, less than 45 nM, less than 40 nM, less than 35 nM, less than 30 nM, less than 25 nM, less than 20 nM, less than 15 nM, less than 10 nM, less than 9 nM, less than 8 nM, less than 7 nM, less than 6 nM, less than 5 nM, less than 4 nM, less than 3 nM, less than 2 nM, or less than 1 nM. In some embodiments, the dissociation constant (K_{D}) is determined at a temperature of approximately 4° C. In some embodiments, the K_{D} is determined using a monovalent antibody (e.g., a Fab) or a full-length antibody in a monovalent form. Methods for the preparation and selection of antibodies that interact and/or bind with specificity to TREM2 are described herein. (e.g., see Example 1).

[0256] Dissociation constants may be determined through any analytical technique, including any biochemical or biophysical technique such as ELISA, surface plasmon resonance (SPR), bio-layer interferometry (see, e.g., Octet System by ForteBio), isothermal titration calorimetry (ITC), differential scanning calorimetry (DSC), circular dichroism (CD), stopped-flow analysis, and colorimetric or fluorescent protein melting analyses. In some embodiments, the dissociation constant (K_{D}) for TREM2 is determined at a temperature of approximately 4° C. In some embodiments, the K_{D} is determined using a monovalent antibody (e.g., a Fab) or a full-length antibody. In some embodiments, the K_{D} is determined using a full-length antibody in a monovalent form. Utilizing, for example, any assay described herein (see, e.g., Example 1).

[0257] Additional anti-TREM2 antibodies, e.g., antibodies that specifically bind to a TREM2 protein of the present disclosure, may be identified, screened, and/or characterized for their physical/chemical properties and/or biological activities by various assays known in the art.

[0258] Bispecific Antibodies

[0259] Certain aspects of the present disclosure relate to bispecific antibodies that bind to a TREM2 protein of the present disclosure and a second antigen. Methods of generating bispecific antibodies are well known in the art and described herein. In some embodiments, bispecific antibodies of the present disclosure bind to one or more amino acid residues of human TREM2 (SEQ ID NO: 1), or amino acid residues on a TREM2 protein corresponding to amino acid residues of SEQ ID NO: 1. In other embodiments, bispecific antibodies of the present disclosure also bind to one or more amino acid residues of human DAP12 (SEQ ID NO: 887), or amino acid residues on a DAP12 protein corresponding to amino acid residues of SEQ ID NO: 887.

[0260] In some embodiments, bispecific antibodies of the present disclosure recognize a first antigen and a second antigen. In some embodiments, the first antigen is human TREM2 or a naturally occurring variant thereof, or human DAP12 or a naturally occurring variant thereof. In some embodiments, the second antigen is a) an antigen facilitating transport across the blood-brain-barrier; (b) an antigen facilitating transport across the blood-brain-barrier selected from transferrin receptor (TR), insulin receptor (HIR), insulin-like growth factor receptor (IGFR), low-density lipoprotein receptor related proteins 1 and 2 (LPR-1 and 2), diphtheria toxin receptor, CRM197, a llama single domain antibody, TMEM 30(A), a protein transduction domain, TAT, Syn-B, penetratin, a poly-arginine peptide, an angiopep peptide, and ANG1005; (c) a disease-causing protein selected from amyloid beta, oligomeric amyloid beta, amyloid beta plaques, amyloid precursor protein or fragments thereof, Tau, IAPP, alpha-synuclein, TDP-43, FUS protein, C9orf72 (chromosome 9 open reading frame 72), c9RAN protein, prion protein, PrPSc, huntingtin, calcitonin, superoxide dismutase, ataxin, ataxin 1, ataxin 2, ataxin 3, ataxin 7, ataxin 8, ataxin 10, Lewy body, atrial natriuretic factor, islet amyloid polypeptide, insulin, apolipoprotein AI, serum amyloid A, medin, prolactin, transthyretin, lysozyme, beta 2 microglobulin, gelsolin, keratoepithelin, cystatin, immunoglobulin light chain AL, S-IBM protein, Repeat-associated non-ATG (RAN) translation products, DiPeptide repeat (DPR) peptides, glycine-alanine (GA) repeat peptides, glycine-proline (GP) repeat peptides, glycine-arginine (GR) repeat peptides, proline-alanine (PA) repeat peptides, ubiquitin, and proline-arginine (PR) repeat peptides; and (d) ligands and/or proteins expressed on immune cells, wherein the ligands and/or proteins selected from CD40, OX40, ICOS, CD28, CD137/4-1BB, CD27, GITR, PD-L1, CTLA-4, PD-L2, PD-1, B7-H3, B7-H4, HVEM, BTLA, KIR, GALS, TIM3, A2AR, LAG-3, and phosphatidylserine; and (e) a protein, lipid, polysaccharide, or glycolipid expressed on one or more tumor cells and any combination thereof.

[0261] Antibody Fragments

[0262] Certain aspects of the present disclosure relate to antibody fragments that bind to one or more of human TREM2, a naturally occurring variant of human TREM2, and a disease variant of human TREM2. In some embodiments, the antibody fragment is an Fab, Fab′, Fab′-SH, F(ab′)2, Fv or scFv fragment. In some embodiments, the antibody fragment is used in combination with one or more antibodies that specifically bind a disease-causing protein selected from: a) an antigen facilitating transport across the blood-brain-barrier; (b) an antigen facilitating transport across the blood-brain-barrier selected from transferrin receptor (TR), insulin receptor (HIR), insulin-like growth factor receptor (IGFR), low-density lipoprotein receptor related proteins 1 and 2 (LPR-1 and 2), diphtheria toxin receptor, CRM197, a llama single domain antibody, TMEM 30(A), a protein transduction domain, TAT, Syn-B, penetratin, a poly-arginine peptide, an angiopep peptide, and ANG1005; (c) a disease-causing protein selected from amyloid beta, oligomeric amyloid beta, amyloid beta plaques, amyloid precursor protein or fragments thereof, Tau, IAPP, alpha-synuclein, TDP-43, FUS protein, C9orf72 (chromosome 9 open reading frame 72), c9RAN protein, prion protein, PrPSc, huntingtin, calcitonin, superoxide dismutase, ataxin, ataxin 1, ataxin 2, ataxin 3, ataxin 7, ataxin 8, ataxin 10, Lewy body, atrial natriuretic factor, islet amyloid polypeptide, insulin, apolipoprotein AI, serum amyloid A, medin, prolactin, transthyretin, lysozyme, beta 2 microglobulin, gelsolin, keratoepithelin, cystatin, immunoglobulin light chain AL, S-IBM protein, Repeat-associated non-ATG (RAN) translation products, DiPeptide repeat (DPR) peptides, glycine-alanine (GA) repeat peptides, glycine-proline (GP) repeat peptides, glycine-arginine (GR) repeat peptides, proline-alanine (PA) repeat peptides, ubiquitin, and proline-arginine (PR) repeat peptides; and (d) ligands and/or proteins expressed on immune cells, wherein the ligands and/or proteins selected from CD40, OX40, ICOS, CD28, CD137/4-1BB, CD27, GITR, PD-L1, CTLA-4, PD-L2, PD-1, B7-H3, B7-H4, HVEM, BTLA, KIR, GALS, TIM3, A2AR, LAG-3, and phosphatidylserine; and (e) a protein, lipid, polysaccharide, or glycolipid expressed on one or more tumor cells, and any combination thereof.

[0263] Antibody Frameworks

[0264] Any of the antibodies described herein further include a framework. In some embodiments, the framework is a human immunoglobulin framework. For example, in some embodiments, an antibody (e.g., an anti-TREM2 antibody) comprises HVRs as in any of the above embodiments and further comprises an acceptor human framework, e.g., a human immunoglobulin framework or a human consensus framework. Human immunoglobulin frameworks may be part of the human antibody, or a non-human antibody may be humanized by replacing one or more endogenous frameworks with human framework region(s). Human framework regions that may be used for humanization include but are not limited to: framework regions selected using the “best-fit” method (see, e.g., Sims et al. J. Immunol. 151:2296 (1993)); framework regions derived from the consensus sequence of human antibodies of a particular subgroup of light or heavy chain variable regions (see, e.g., Carter et al. Proc. Natl. Acad. Sci. USA, 89:4285 (1992); and Presta et al. J. Immunol., 151:2623 (1993)); human mature (somatically mutated) framework regions or human germline framework regions (see, e.g., Almagro and Fransson, Front. Biosci. 13:1619-1633 (2008)); and framework regions derived from screening FR libraries (see, e.g., Baca et al., J. Biol. Chem. 272:10678-10684 (1997) and Rosok et al., J. Biol. Chem. 271:22611-22618 (1996)).

[0265] In some embodiments, an antibody comprises a light chain variable region comprising an HVR-L1, an HVR-L2, and an HVR-L3 of the present disclosure and one, two, three or four of the light chain framework regions as shown in Table 4A. In some embodiments, an antibody comprises a heavy chain variable region comprising an HVR-H1, an HVR-H2, and an HVR-H3 of the present disclosure and one, two, three or four of the heavy chain framework regions as shown in Table 4B. In some embodiments, an antibody comprises a light chain variable region comprising an HVR-L1, an HVR-L2, and an HVR-L3 of the present disclosure and one, two, three or four of the light chain framework regions as shown in Table 4A and further comprises a heavy chain variable region comprising an HVR-H1, an HVR-H2, and an HVR-H3 of the present disclosure and one, two, three or four of the heavy chain framework regions as shown in Table 4B.

[0266] PI3K Activation

[0267] In some embodiments, the anti-TREM2 antibodies of the present disclosure may induce PI3K activation after binding to a TREM2 protein expressed in a cell.

[0268] PI3Ks are a family of related intracellular signal transducer kinases capable of phosphorylating the 3-position hydroxyl group of the inositol ring of phosphatidylinositol (PtdIns). The PI3K family is divided into three different classes (Class I, Class II, and Class III) based on primary structure, regulation, and in vitro lipid substrate specificity.

[0269] Activated PI3K produces various 3-phosphorylated phosphoinositides, including without limitation, PtdIns3P, Ptdlns(3,4)P2, Ptdlns(3,5)P2, and Ptdlns(3,4,5)P3. These 3-phosphorylated phosphoinositides function in a mechanism by which signaling proteins are recruited to various cellular membranes. These signaling proteins contain phosphoinositide-binding domains, including without limitation, PX domains, pleckstrin homology domains (PH domains), and FYVE domains. Any method known in the art for determining PI3K activation may be used.

[0270] In some embodiments, anti-TREM2 antibodies of the present disclosure may be beneficial for preventing, lowering the risk of, or treating conditions and/or diseases associated with decreased levels of PI3K activity, including dementia, frontotemporal dementia, Alzheimer's disease, vascular dementia, mixed dementia, Creutzfeldt-Jakob disease, normal pressure hydrocephalus, amyotrophic lateral sclerosis, Huntington's disease, tauopathy disease, Nasu-Hakola disease, stroke, acute trauma, chronic trauma, cognitive deficit, memory loss, lupus, acute and chronic colitis, rheumatoid arthritis, wound healing, Crohn's disease, inflammatory bowel disease, ulcerative colitis, obesity, malaria, essential tremor, central nervous system lupus, Behcet's disease, Parkinson's disease, dementia with Lewy bodies, multiple system atrophy, Shy-Drager syndrome, progressive supranuclear palsy, cortical basal ganglionic degeneration, acute disseminated encephalomyelitis, granulomartous disorders, sarcoidosis, diseases of aging, seizures, spinal cord injury, traumatic brain injury, age related macular degeneration, glaucoma, retinitis pigmentosa, retinal degeneration, respiratory tract infection, sepsis, eye infection, systemic infection, lupus, arthritis, multiple sclerosis, low bone density, osteoporosis, osteogenesis, osteopetrotic disease, Paget's disease of bone, cancer, bladder cancer, brain cancer, breast cancer, colon cancer, rectal cancer, endometrial cancer, kidney cancer, renal cell cancer, renal pelvis cancer, leukemia, lung cancer, melanoma, non-Hodgkin's lymphoma, pancreatic cancer, prostate cancer, ovarian cancer, fibrosarcoma, acute lymphoblastic leukemia (ALL), acute myeloid leukemia (AML), chronic lymphocytic leukemia (CLL), chronic myeloid leukemia (CML), multiple myeloma, polycythemia vera, essential thrombocytosis, primary or idiopathic myelofibrosis, primary or idiopathic myelosclerosis, myeloid-derived tumors, tumors that express TREM2, thyroid cancer, infections, CNS herpes, parasitic infections, Trypanosome infection, Cruzi infection, Pseudomonas aeruginosa infection, Leishmania donovani infection, group B Streptococcus infection, Campylobacter jejuni infection, Neisseria meningiditis infection, type I HIV, and Haemophilus influenza, comprising administering to an individual in need thereof a therapeutically effective amount of an agent that do not, inhibits interaction between TREM2 and one or more TREM2 ligands, and/or enhance one or more activities of at least one TREM2 ligand. Other aspects of the present disclosure relate to an agent that do not, inhibits interaction between TREM2 and one or more TREM2 ligands, and/or enhance one or more activities of at least one TREM2 ligand, for use in preventing, reducing risk, or treating a disease, disorder, or injury selected from dementia, frontotemporal dementia, Alzheimer's disease, vascular dementia, mixed dementia, Creutzfeldt-Jakob disease, normal pressure hydrocephalus, amyotrophic lateral sclerosis, Huntington's disease, tauopathy disease, Nasu-Hakola disease, stroke, acute trauma, chronic trauma, cognitive deficit, memory loss, lupus, acute and chronic colitis, rheumatoid arthritis, wound healing, Crohn's disease, inflammatory bowel disease, ulcerative colitis, obesity, malaria, essential tremor, central nervous system lupus, Behcet's disease, Parkinson's disease, dementia with Lewy bodies, multiple system atrophy, Shy-Drager syndrome, progressive supranuclear palsy, cortical basal ganglionic degeneration, acute disseminated encephalomyelitis, granulomartous disorders, sarcoidosis, diseases of aging, seizures, spinal cord injury, traumatic brain injury, age related macular degeneration, glaucoma, retinitis pigmentosa, retinal degeneration, respiratory tract infection, sepsis, eye infection, systemic infection, lupus, arthritis, multiple sclerosis, low bone density, osteoporosis, osteogenesis, osteopetrotic disease, Paget's disease of bone, cancer, bladder cancer, brain cancer, breast cancer, colon cancer, rectal cancer, endometrial cancer, kidney cancer, renal cell cancer, renal pelvis cancer, leukemia, lung cancer, melanoma, non-Hodgkin's lymphoma, pancreatic cancer, prostate cancer, ovarian cancer, fibrosarcoma, acute lymphoblastic leukemia (ALL), acute myeloid leukemia (AML), chronic lymphocytic leukemia (CLL), chronic myeloid leukemia (CML), multiple myeloma, polycythemia vera, essential thrombocytosis, primary or idiopathic myelofibrosis, primary or idiopathic myelosclerosis, myeloid-derived tumors, tumors that express TREM2, thyroid cancer, infections, CNS herpes, parasitic infections, Trypanosome infection, Cruzi infection, Pseudomonas aeruginosa infection, Leishmania donovani infection, group B Streptococcus infection, Campylobacter jejuni infection, Neisseria meningiditis infection, type I HIV, and Haemophilus influenza.

[0271] Modulated Expression of Anti-Inflammatory Mediators

[0272] In some embodiments, the anti-TREM2 antibodies of the present disclosure modulate (e.g., increase or decrease) anti-inflammatory mediators in the brain after binding to a TREM2 protein expressed on a cell surface. The anti-TREM2 antibodies of the present disclosure modulate the expression of cytokines (e.g., anti-inflammatory mediators) and/or modulate the expression of pro-inflammatory mediators after binding to a TREM2 protein expressed in a cell. Once the cells are dying due to deficiency in TREM2 signaling they induce a pro inflammatory response.

[0273] Inflammation is part of a complex biological response of vascular tissues to harmful stimuli, such as pathogens, damaged cells, and irritants. The classical signs of acute inflammation are pain, heat, redness, swelling, and loss of function. Inflammation is a protective attempt by an organism to remove the injurious stimuli and to initiate the healing process. Inflammation can be classified as either acute inflammation or chronic inflammation. Acute inflammation is the initial response of the body to harmful stimuli and is achieved by the increased movement of plasma and leukocytes (especially granulocytes) from the blood into the injured tissues. A cascade of biochemical events propagates and matures the inflammatory response, involving the local vascular system, the immune system, and various cells within the injured tissue. Chronic inflammation is prolonged inflammation that leads to a progressive shift in the type of cells present at the site of inflammation and is characterized by simultaneous destruction and healing of the tissue from the inflammatory process.

[0274] As used herein, anti-inflammatory mediators are proteins involved either directly or indirectly (e.g., by way of an anti-inflammatory signaling pathway) in a mechanism that reduces, inhibits, or inactivates an inflammatory response. Any method known in the art for identifying and characterizing anti-inflammatory mediators may be used. Examples of anti-inflammatory mediators include, without limitation, cytokines, such as IL-4, IL-10 TGF-β, IL-13, IL-35 IL-16, IFN-alpha, IL-1Ra, VEGF, G-CSF, YM, AXL, FLT1 and soluble receptors for TNF or IL-6

[0275] In some embodiments, the anti-TREM2 antibodies of the present disclosure may modulate expression of cytokines, such as IL-12p70, IL-6, and IL-10. In certain embodiments, modulated expression of the cytokines occurs in macrophages, dendritic cells, monocytes, osteoclasts, Langerhans cells of skin, Kupffer cells, and/or microglial cells. Modulated expression may include, without limitation, modulated gene expression, modulated transcriptional expression, or modulated protein expression. Any method known in the art for determining gene, transcript (e.g., mRNA), and/or protein expression may be used. For example, Northern blot analysis may be used to determine cytokine gene expression levels, RT-PCR may be used to determine the level of cytokine transcription, and Western blot analysis may be used to determine cytokine protein levels.

[0276] As used herein, a cytokine may have modulated (e.g., increased or decreased) expression if its expression in one or more cells of a subject treated with an anti-TREM2 antibody of the present disclosure is modulated as compared to the expression of the same cytokine expressed in one or more cells of a corresponding subject that is not treated with the anti-TREM2 antibody. In some embodiments, an anti-TREM2 antibody of the present disclosure may modulate cytokine expression in one or more cells of a subject by at least 10%, at least 15%, at least 20%, at least 25%, at least 30%, at least 35%, at least 40%, at least 45%, at least 50%, at least 55%, at least 60%, at least 65%, at least 70%, at least 75%, at least 80%, at least 85%, at least 90%, at least 95%, at least 100%, at least 110%, at least 115%, at least 120%, at least 125%, at least 130%, at least 135%, at least 140%, at least 145%, at least 150%, at least 160%, at least 170%, at least 180%, at least 190%, or at least 200% for example, as compared to cytokine expression in one or more cells of a corresponding subject that is not treated with the anti-TREM2 antibody. In other embodiments, an anti-TREM2 antibody of the present disclosure modulate cytokine expression in one or more cells of a subject by at least 1.5 fold, at least 1.6 fold, at least 1.7 fold, at least 1.8 fold, at least 1.9 fold, at least 2.0 fold, at least 2.1 fold, at least 2.15 fold, at least 2.2 fold, at least 2.25 fold, at least 2.3 fold, at least 2.35 fold, at least 2.4 fold, at least 2.45 fold, at least 2.5 fold, at least 2.55 fold, at least 3.0 fold, at least 3.5 fold, at least 4.0 fold, at least 4.5 fold, at least 5.0 fold, at least 5.5 fold, at least 6.0 fold, at least 6.5 fold, at least 7.0 fold, at least 7.5 fold, at least 8.0 fold, at least 8.5 fold, at least 9.0 fold, at least 9.5 fold, or at least 10 fold, for example, as compared to cytokine expression in one or more cells of a corresponding subject that is not treated with the anti-TREM2 antibody.

[0277] In some embodiments, anti-TREM2 antibodies of the present disclosure may be useful for preventing, lowering the risk of, or treating conditions and/or diseases associated with abnormal levels of one or more anti-inflammatory mediators, including dementia, frontotemporal dementia, Alzheimer's disease, vascular dementia, mixed dementia, Creutzfeldt-Jakob disease, normal pressure hydrocephalus, amyotrophic lateral sclerosis, Huntington's disease, tauopathy disease, Nasu-Hakola disease, stroke, acute trauma, chronic trauma, cognitive deficit, memory loss, lupus, acute and chronic colitis, rheumatoid arthritis, wound healing, Crohn's disease, inflammatory bowel disease, ulcerative colitis, obesity, malaria, essential tremor, central nervous system lupus, Behcet's disease, Parkinson's disease, dementia with Lewy bodies, multiple system atrophy, Shy-Drager syndrome, progressive supranuclear palsy, cortical basal ganglionic degeneration, acute disseminated encephalomyelitis, granulomartous disorders, sarcoidosis, diseases of aging, seizures, spinal cord injury, traumatic brain injury, age related macular degeneration, glaucoma, retinitis pigmentosa, retinal degeneration, respiratory tract infection, sepsis, eye infection, systemic infection, lupus, arthritis, multiple sclerosis, low bone density, osteoporosis, osteogenesis, osteopetrotic disease, Paget's disease of bone, cancer, bladder cancer, brain cancer, breast cancer, colon cancer, rectal cancer, endometrial cancer, kidney cancer, renal cell cancer, renal pelvis cancer, leukemia, lung cancer, melanoma, non-Hodgkin's lymphoma, pancreatic cancer, prostate cancer, ovarian cancer, fibrosarcoma, acute lymphoblastic leukemia (ALL), acute myeloid leukemia (AML), chronic lymphocytic leukemia (CLL), chronic myeloid leukemia (CML), multiple myeloma, polycythemia vera, essential thrombocytosis, primary or idiopathic myelofibrosis, primary or idiopathic myelosclerosis, myeloid-derived tumors, tumors that express TREM2, thyroid cancer, infections, CNS herpes, parasitic infections, Trypanosome infection, Cruzi infection, Pseudomonas aeruginosa infection, Leishmania donovani infection, group B Streptococcus infection, Campylobacter jejuni infection, Neisseria meningiditis infection, type I HIV, and Haemophilus influenza, comprising administering to an individual in need thereof a therapeutically effective amount of an agent that does not inhibits interaction between TREM2 and one or more TREM2 ligands, and/or enhance one or more activities of at least one TREM2 ligand. Other aspects of the present disclosure relate to an agent that does not inhibits interaction between TREM2 and one or more TREM2 ligands, and/or enhance one or more activities of at least one TREM2 ligand, for use in preventing, reducing risk, or treating a disease, disorder, or injury selected from dementia, frontotemporal dementia, Alzheimer's disease, vascular dementia, mixed dementia, Creutzfeldt-Jakob disease, normal pressure hydrocephalus, amyotrophic lateral sclerosis, Huntington's disease, tauopathy disease, Nasu-Hakola disease, stroke, acute trauma, chronic trauma, cognitive deficit, memory loss, lupus, acute and chronic colitis, rheumatoid arthritis, wound healing, Crohn's disease, inflammatory bowel disease, ulcerative colitis, obesity, malaria, essential tremor, central nervous system lupus, Behcet's disease, Parkinson's disease, dementia with Lewy bodies, multiple system atrophy, Shy-Drager syndrome, progressive supranuclear palsy, cortical basal ganglionic degeneration, acute disseminated encephalomyelitis, granulomartous disorders, sarcoidosis, diseases of aging, seizures, spinal cord injury, traumatic brain injury, age related macular degeneration, glaucoma, retinitis pigmentosa, retinal degeneration, respiratory tract infection, sepsis, eye infection, systemic infection, lupus, arthritis, multiple sclerosis, low bone density, osteoporosis, osteogenesis, osteopetrotic disease, Paget's disease of bone, cancer, bladder cancer, brain cancer, breast cancer, colon cancer, rectal cancer, endometrial cancer, kidney cancer, renal cell cancer, renal pelvis cancer, leukemia, lung cancer, melanoma, non-Hodgkin's lymphoma, pancreatic cancer, prostate cancer, ovarian cancer, fibrosarcoma, acute lymphoblastic leukemia (ALL), acute myeloid leukemia (AML), chronic lymphocytic leukemia (CLL), chronic myeloid leukemia (CML), multiple myeloma, polycythemia vera, essential thrombocytosis, primary or idiopathic myelofibrosis, primary or idiopathic myelosclerosis, myeloid-derived tumors, tumors that express TREM2, thyroid cancer, infections, CNS herpes, parasitic infections, Trypanosome infection, Cruzi infection, Pseudomonas aeruginosa infection, Leishmania donovani infection, group B Streptococcus infection, Campylobacter jejuni infection, Neisseria meningiditis infection, type I HIV, and Haemophilus influenza.

[0278] Modulated Expression of Pro-Inflammatory Mediators

[0279] In some embodiments, the anti-TREM2 antibodies of the present disclosure may modulate (e.g., increase or decrease) the expression of pro-inflammatory mediators after binding to a TREM2 protein expressed in a cell.

[0280] As used herein, pro-inflammatory mediators are proteins involved either directly or indirectly (e.g., by way of pro-inflammatory signaling pathways) in a mechanism that induces, activates, promotes, or otherwise increases an inflammatory response. Any method known in the art for identifying and characterizing pro-inflammatory mediators may be used. Examples of pro-inflammatory mediators include, without limitation, cytokines such as IFN-β, IL-1α, IL-1β, CD86, TNF-α, IL-6, IL-8, CRP, MCP-1/CCL2, CCL3, CCL4, CCL5, CCR2, CXCL-10, Gata3, IL-20 family members, IL-33, LIF, IFN-gamma, OSM, CNTF, CSF1, OPN, CD11c, GM-CSF, IL-11, IL-12, IL-17, IL-18, and IL-23.

[0281] In some embodiments, the anti-TREM2 antibodies of the present disclosure may modulate functional expression and/or secretion of pro-inflammatory mediators, such as IFN-β, IL-la, IL-1β, CD86, TNF-α, IL-6, IL-8, CRP, MCP-1/CCL2, CCL3, CCL4, CCL5, CCR2, CXCL-10, Gata3, IL-20 family members, IL-33, LIF, IFN-gamma, OSM, CNTF, CSF1, OPN, CD11c, GM-CSF, IL-11, IL-12, IL-17, IL-18, and IL-23. In certain embodiments, modulated expression of the pro-inflammatory mediators occurs in macrophages, dendritic cells, monocytes, osteoclasts, Langerhans cells of skin, Kupffer cells, and/or microglial cells. Modulated expression may include, without limitation, modulated gene expression, modulated transcriptional expression, or modulated protein expression. Any method known in the art for determining gene, transcript (e.g., mRNA), and/or protein expression may be used. For example, Northern blot analysis may be used to determine pro-inflammatory mediator gene expression levels, RT-PCR may be used to determine the level of pro-inflammatory mediator transcription, and Western blot analysis may be used to determine pro-inflammatory mediator protein levels.

[0282] In certain embodiments, pro-inflammatory mediators include inflammatory cytokines. Accordingly, in certain embodiments, the anti-TREM2 antibodies of the present disclosure may modulate secretion of one or more inflammatory cytokines. Examples of inflammatory cytokines whose secretion may be reduced by the anti-TREM2 antibodies of the present disclosure include, without limitation, IFN-β, IL-1α, IL-1β, CD86, TNF-α, IL-6, IL-8, CRP, MCP-1/CCL2, CCL3, CCL4, CCL5, CCR2, CXCL-10, Gata3, IL-20 family members, IL-33, LIF, IFN-gamma, OSM, CNTF, CSF1, OPN, CD11c, GM-CSF, IL-11, IL-12, IL-17, IL-18, and IL-23.

[0283] In certain embodiments, pro-inflammatory mediators include inflammatory receptors. Accordingly, in certain embodiments, the anti-TREM2 antibodies of the present disclosure may modulate expression of one or more inflammatory receptors. Examples of inflammatory receptors whose expression may be reduced by the anti-TREM2 antibodies of the present disclosure include, without limitation, CD86.

[0284] As used herein, a pro-inflammatory mediator may have modulated expression if its expression in one or more cells of a subject treated with an agonist anti-TREM2 antibody of the present disclosure is modulated (e.g., increased or decreased) as compared to the expression of the same pro-inflammatory mediator expressed in one or more cells of a corresponding subject that is not treated with the agonist anti-TREM2 antibody. In some embodiments, the agonist anti-TREM2 antibody of the present disclosure may modulate pro-inflammatory mediator expression in one or more cells of a subject by at least 10%, at least 15%, at least 20%, at least 25%, at least 30%, at least 35%, at least 40%, at least 45%, at least 50%, at least 55%, at least 60%, at least 65%, at least 70%, at least 75%, at least 80%, at least 85%, at least 90%, at least 95%, at least 100%, at least 110%, at least 115%, at least 120%, at least 125%, at least 130%, at least 135%, at least 140%, at least 145%, at least 150%, at least 160%, at least 170%, at least 180%, at least 190%, or at least 200% for example, as compared to pro-inflammatory mediator expression in one or more cells of a corresponding subject that is not treated with the agonist anti-TREM2 antibody. In other embodiments, the agonist anti-TREM2 antibody may modulate pro-inflammatory mediator expression in one or more cells of a subject by at least 1.5 fold, at least 1.6 fold, at least 1.7 fold, at least 1.8 fold, at least 1.9 fold, at least 2.0 fold, at least 2.1 fold, at least 2.15 fold, at least 2.2 fold, at least 2.25 fold, at least 2.3 fold, at least 2.35 fold, at least 2.4 fold, at least 2.45 fold, at least 2.5 fold, at least 2.55 fold, at least 3.0 fold, at least 3.5 fold, at least 4.0 fold, at least 4.5 fold, at least 5.0 fold, at least 5.5 fold, at least 6.0 fold, at least 6.5 fold, at least 7.0 fold, at least 7.5 fold, at least 8.0 fold, at least 8.5 fold, at least 9.0 fold, at least 9.5 fold, or at least 10 fold, for example, as compared to pro-inflammatory mediator expression in one or more cells of a corresponding subject that is not treated with the anti-TREM2 antibody.

[0285] In some embodiments, anti-TREM2 antibodies of the present disclosure may be useful for preventing, lowering the risk of, or treating conditions and/or diseases associated with abnormal levels of one or more pro-inflammatory mediators, including dementia, frontotemporal dementia, Alzheimer's disease, vascular dementia, mixed dementia, Creutzfeldt-Jakob disease, normal pressure hydrocephalus, amyotrophic lateral sclerosis, Huntington's disease, tauopathy disease, Nasu-Hakola disease, stroke, acute trauma, chronic trauma, cognitive deficit, memory loss, lupus, acute and chronic colitis, rheumatoid arthritis, wound healing, Crohn's disease, inflammatory bowel disease, ulcerative colitis, obesity, malaria, essential tremor, central nervous system lupus, Behcet's disease, Parkinson's disease, dementia with Lewy bodies, multiple system atrophy, Shy-Drager syndrome, progressive supranuclear palsy, cortical basal ganglionic degeneration, acute disseminated encephalomyelitis, granulomartous disorders, sarcoidosis, diseases of aging, seizures, spinal cord injury, traumatic brain injury, age related macular degeneration, glaucoma, retinitis pigmentosa, retinal degeneration, respiratory tract infection, sepsis, eye infection, systemic infection, lupus, arthritis, multiple sclerosis, low bone density, osteoporosis, osteogenesis, osteopetrotic disease, Paget's disease of bone, cancer, bladder cancer, brain cancer, breast cancer, colon cancer, rectal cancer, endometrial cancer, kidney cancer, renal cell cancer, renal pelvis cancer, leukemia, lung cancer, melanoma, non-Hodgkin's lymphoma, pancreatic cancer, prostate cancer, ovarian cancer, fibrosarcoma, acute lymphoblastic leukemia (ALL), acute myeloid leukemia (AML), chronic lymphocytic leukemia (CLL), chronic myeloid leukemia (CML), multiple myeloma, polycythemia vera, essential thrombocytosis, primary or idiopathic myelofibrosis, primary or idiopathic myelosclerosis, myeloid-derived tumors, tumors that express TREM2, thyroid cancer, infections, CNS herpes, parasitic infections, Trypanosome infection, Cruzi infection, Pseudomonas aeruginosa infection, Leishmania donovani infection, group B Streptococcus infection, Campylobacter jejuni infection, Neisseria meningiditis infection, type I HIV, and Haemophilus influenza, comprising administering to an individual in need thereof a therapeutically effective amount of an agent that does not inhibit interaction between TREM2 and one or more TREM2 ligands, and/or enhance one or more activities of at least one TREM2 ligand. Other aspects of the present disclosure relate to an agent that does not inhibit interaction between TREM2 and one or more TREM2 ligands, and/or enhance one or more activities of at least one TREM2 ligand, for use in preventing, reducing risk, or treating a disease, disorder, or injury selected from dementia, frontotemporal dementia, Alzheimer's disease, vascular dementia, mixed dementia, Creutzfeldt-Jakob disease, normal pressure hydrocephalus, amyotrophic lateral sclerosis, Huntington's disease, tauopathy disease, Nasu-Hakola disease, stroke, acute trauma, chronic trauma, cognitive deficit, memory loss, lupus, acute and chronic colitis, rheumatoid arthritis, wound healing, Crohn's disease, inflammatory bowel disease, ulcerative colitis, obesity, malaria, essential tremor, central nervous system lupus, Behcet's disease, Parkinson's disease, dementia with Lewy bodies, multiple system atrophy, Shy-Drager syndrome, progressive supranuclear palsy, cortical basal ganglionic degeneration, acute disseminated encephalomyelitis, granulomartous disorders, sarcoidosis, diseases of aging, seizures, spinal cord injury, traumatic brain injury, age related macular degeneration, glaucoma, retinitis pigmentosa, retinal degeneration, respiratory tract infection, sepsis, eye infection, systemic infection, lupus, arthritis, multiple sclerosis, low bone density, osteoporosis, osteogenesis, osteopetrotic disease, Paget's disease of bone, cancer, bladder cancer, brain cancer, breast cancer, colon cancer, rectal cancer, endometrial cancer, kidney cancer, renal cell cancer, renal pelvis cancer, leukemia, lung cancer, melanoma, non-Hodgkin's lymphoma, pancreatic cancer, prostate cancer, ovarian cancer, fibrosarcoma, acute lymphoblastic leukemia (ALL), acute myeloid leukemia (AML), chronic lymphocytic leukemia (CLL), chronic myeloid leukemia (CML), multiple myeloma, polycythemia vera, essential thrombocytosis, primary or idiopathic myelofibrosis, primary or idiopathic myelosclerosis, myeloid-derived tumors, tumors that express TREM2, thyroid cancer, infections, CNS herpes, parasitic infections, Trypanosome infection, Cruzi infection, Pseudomonas aeruginosa infection, Leishmania donovani infection, group B Streptococcus infection, Campylobacter jejuni infection, Neisseria meningiditis infection, type I HIV, and Haemophilus influenza.

[0286] ERK Phosphorylation

[0287] In some embodiments, the anti-TREM2 antibodies of the present disclosure may induce extracellular signal-regulated kinase (ERK) phosphorylation after binding to a TREM2 protein expressed in a cell.

[0288] Extracellular-signal-regulated kinases (ERKs) are widely expressed protein kinase intracellular signaling kinases that are involved in, for example, the regulation of meiosis, mitosis, and postmitotic functions in differentiated cells. Various stimuli, such as growth factors, cytokines, virus infection, ligands for heterotrimeric G protein-coupled receptors, transforming agents, and carcinogens, activate ERK pathways. Phosphorylation of ERKs leads to the activation of their kinase activity.

[0289] In some embodiments, anti-TREM2 antibodies of the present disclosure may be beneficial for preventing, lowering the risk of, or treating conditions and/or diseases associated with decreased levels of ERK phosphorylation, including dementia, frontotemporal dementia, Alzheimer's disease, vascular dementia, mixed dementia, Creutzfeldt-Jakob disease, normal pressure hydrocephalus, amyotrophic lateral sclerosis, Huntington's disease, tauopathy disease, Nasu-Hakola disease, stroke, acute trauma, chronic trauma, cognitive deficit, memory loss, lupus, acute and chronic colitis, rheumatoid arthritis, wound healing, Crohn's disease, inflammatory bowel disease, ulcerative colitis, obesity, malaria, essential tremor, central nervous system lupus, Behcet's disease, Parkinson's disease, dementia with Lewy bodies, multiple system atrophy, Shy-Drager syndrome, progressive supranuclear palsy, cortical basal ganglionic degeneration, acute disseminated encephalomyelitis, granulomartous disorders, sarcoidosis, diseases of aging, seizures, spinal cord injury, traumatic brain injury, age related macular degeneration, glaucoma, retinitis pigmentosa, retinal degeneration, respiratory tract infection, sepsis, eye infection, systemic infection, lupus, arthritis, multiple sclerosis, low bone density, osteoporosis, osteogenesis, osteopetrotic disease, Paget's disease of bone, cancer, bladder cancer, brain cancer, breast cancer, colon cancer, rectal cancer, endometrial cancer, kidney cancer, renal cell cancer, renal pelvis cancer, leukemia, lung cancer, melanoma, non-Hodgkin's lymphoma, pancreatic cancer, prostate cancer, ovarian cancer, fibrosarcoma, acute lymphoblastic leukemia (ALL), acute myeloid leukemia (AML), chronic lymphocytic leukemia (CLL), chronic myeloid leukemia (CML), multiple myeloma, polycythemia vera, essential thrombocytosis, primary or idiopathic myelofibrosis, primary or idiopathic myelosclerosis, myeloid-derived tumors, tumors that express TREM2, thyroid cancer, infections, CNS herpes, parasitic infections, Trypanosome infection, Cruzi infection, Pseudomonas aeruginosa infection, Leishmania donovani infection, group B Streptococcus infection, Campylobacter jejuni infection, Neisseria meningiditis infection, type I HIV, and Haemophilus influenza, comprising administering to an individual in need thereof a therapeutically effective amount of an agent that does not, inhibit interaction between TREM2 and one or more TREM2 ligands, and/or enhance one or more activities of at least one TREM2 ligand. Other aspects of the present disclosure relate to an agent that does not inhibit interaction between TREM2 and one or more TREM2 ligands, and/or enhance one or more activities of at least one TREM2 ligand, for use in preventing, reducing risk, or treating a disease, disorder, or injury selected from dementia, frontotemporal dementia, Alzheimer's disease, vascular dementia, mixed dementia, Creutzfeldt-Jakob disease, normal pressure hydrocephalus, amyotrophic lateral sclerosis, Huntington's disease, tauopathy disease, Nasu-Hakola disease, stroke, acute trauma, chronic trauma, cognitive deficit, memory loss, lupus, acute and chronic colitis, rheumatoid arthritis, wound healing, Crohn's disease, inflammatory bowel disease, ulcerative colitis, obesity, malaria, essential tremor, central nervous system lupus, Behcet's disease, Parkinson's disease, dementia with Lewy bodies, multiple system atrophy, Shy-Drager syndrome, progressive supranuclear palsy, cortical basal ganglionic degeneration, acute disseminated encephalomyelitis, granulomartous disorders, sarcoidosis, diseases of aging, seizures, spinal cord injury, traumatic brain injury, age related macular degeneration, glaucoma, retinitis pigmentosa, retinal degeneration, respiratory tract infection, sepsis, eye infection, systemic infection, lupus, arthritis, multiple sclerosis, low bone density, osteoporosis, osteogenesis, osteopetrotic disease, Paget's disease of bone, cancer, bladder cancer, brain cancer, breast cancer, colon cancer, rectal cancer, endometrial cancer, kidney cancer, renal cell cancer, renal pelvis cancer, leukemia, lung cancer, melanoma, non-Hodgkin's lymphoma, pancreatic cancer, prostate cancer, ovarian cancer, fibrosarcoma, acute lymphoblastic leukemia (ALL), acute myeloid leukemia (AML), chronic lymphocytic leukemia (CLL), chronic myeloid leukemia (CML), multiple myeloma, polycythemia vera, essential thrombocytosis, primary or idiopathic myelofibrosis, primary or idiopathic myelosclerosis, myeloid-derived tumors, tumors that express TREM2, thyroid cancer, infections, CNS herpes, parasitic infections, Trypanosome infection, Cruzi infection, Pseudomonas aeruginosa infection, Leishmania donovani infection, group B Streptococcus infection, Campylobacter jejuni infection, Neisseria meningiditis infection, type I HIV, and Haemophilus influenza.

[0290] Syk Phosphorylation

[0291] In some embodiments, the anti-TREM2 antibodies of the present disclosure may induce spleen tyrosine kinase (Syk) phosphorylation after binding to a TREM2 protein expressed in a cell.

[0292] Spleen tyrosine kinase (Syk) is an intracellular signaling molecule that functions downstream of TREM2 by phosphorylating several substrates, thereby facilitating the formation of a signaling complex leading to cellular activation and inflammatory processes.

[0293] In some embodiments, anti-TREM2 antibodies of the present disclosure may be beneficial for preventing, lowering the risk of, or treating conditions and/or diseases associated with decreased levels of Syk phosphorylation, including dementia, frontotemporal dementia, Alzheimer's disease, vascular dementia, mixed dementia, Creutzfeldt-Jakob disease, normal pressure hydrocephalus, amyotrophic lateral sclerosis, Huntington's disease, tauopathy disease, Nasu-Hakola disease, stroke, acute trauma, chronic trauma, cognitive deficit, memory loss, lupus, acute and chronic colitis, rheumatoid arthritis, wound healing, Crohn's disease, inflammatory bowel disease, ulcerative colitis, obesity, malaria, essential tremor, central nervous system lupus, Behcet's disease, Parkinson's disease, dementia with Lewy bodies, multiple system atrophy, Shy-Drager syndrome, progressive supranuclear palsy, cortical basal ganglionic degeneration, acute disseminated encephalomyelitis, granulomartous disorders, sarcoidosis, diseases of aging, seizures, spinal cord injury, traumatic brain injury, age related macular degeneration, glaucoma, retinitis pigmentosa, retinal degeneration, respiratory tract infection, sepsis, eye infection, systemic infection, lupus, arthritis, multiple sclerosis, low bone density, osteoporosis, osteogenesis, osteopetrotic disease, Paget's disease of bone, cancer, bladder cancer, brain cancer, breast cancer, colon cancer, rectal cancer, endometrial cancer, kidney cancer, renal cell cancer, renal pelvis cancer, leukemia, lung cancer, melanoma, non-Hodgkin's lymphoma, pancreatic cancer, prostate cancer, ovarian cancer, fibrosarcoma, acute lymphoblastic leukemia (ALL), acute myeloid leukemia (AML), chronic lymphocytic leukemia (CLL), chronic myeloid leukemia (CML), multiple myeloma, polycythemia vera, essential thrombocytosis, primary or idiopathic myelofibrosis, primary or idiopathic myelosclerosis, myeloid-derived tumors, tumors that express TREM2, thyroid cancer, infections, CNS herpes, parasitic infections, Trypanosome infection, Cruzi infection, Pseudomonas aeruginosa infection, Leishmania donovani infection, group B Streptococcus infection, Campylobacter jejuni infection, Neisseria meningiditis infection, type I HIV, and Haemophilus influenza, comprising administering to an individual in need thereof a therapeutically effective amount of an agent that does not inhibit interaction between TREM2 and one or more TREM2 ligands, and/or enhance one or more activities of at least one TREM2 ligand. Other aspects of the present disclosure relate to an agent that does not inhibit interaction between TREM2 and one or more TREM2 ligands, and/or enhance one or more activities of at least one TREM2 ligand, for use in preventing, reducing risk, or treating a disease, disorder, or injury selected from dementia, frontotemporal dementia, Alzheimer's disease, vascular dementia, mixed dementia, Creutzfeldt-Jakob disease, normal pressure hydrocephalus, amyotrophic lateral sclerosis, Huntington's disease, tauopathy disease, Nasu-Hakola disease, stroke, acute trauma, chronic trauma, cognitive deficit, memory loss, lupus, acute and chronic colitis, rheumatoid arthritis, wound healing, Crohn's disease, inflammatory bowel disease, ulcerative colitis, obesity, malaria, essential tremor, central nervous system lupus, Behcet's disease, Parkinson's disease, dementia with Lewy bodies, multiple system atrophy, Shy-Drager syndrome, progressive supranuclear palsy, cortical basal ganglionic degeneration, acute disseminated encephalomyelitis, granulomartous disorders, sarcoidosis, diseases of aging, seizures, spinal cord injury, traumatic brain injury, age related macular degeneration, glaucoma, retinitis pigmentosa, retinal degeneration, respiratory tract infection, sepsis, eye infection, systemic infection, lupus, arthritis, multiple sclerosis, low bone density, osteoporosis, osteogenesis, osteopetrotic disease, Paget's disease of bone, cancer, bladder cancer, brain cancer, breast cancer, colon cancer, rectal cancer, endometrial cancer, kidney cancer, renal cell cancer, renal pelvis cancer, leukemia, lung cancer, melanoma, non-Hodgkin's lymphoma, pancreatic cancer, prostate cancer, ovarian cancer, fibrosarcoma, acute lymphoblastic leukemia (ALL), acute myeloid leukemia (AML), chronic lymphocytic leukemia (CLL), chronic myeloid leukemia (CML), multiple myeloma, polycythemia vera, essential thrombocytosis, primary or idiopathic myelofibrosis, primary or idiopathic myelosclerosis, myeloid-derived tumors, tumors that express TREM2, thyroid cancer, infections, CNS herpes, parasitic infections, Trypanosome infection, Cruzi infection, Pseudomonas aeruginosa infection, Leishmania donovani infection, group B Streptococcus infection, Campylobacter jejuni infection, Neisseria meningiditis infection, type I HIV, and Haemophilus influenza.

[0294] TREM2 Autophosphorylation

[0295] In some embodiments, the anti-TREM2 a antibodies of the present disclosure may induce TREM2 autophosphorylation after binding to a TREM2 protein expressed in a cell.

[0296] In some embodiments, anti-TREM2 antibodies of the present disclosure may be beneficial for preventing, lowering the risk of, or treating conditions and/or diseases associated with decreased levels of TREM2 phosphorylation, including dementia, frontotemporal dementia, Alzheimer's disease, vascular dementia, mixed dementia, Creutzfeldt-Jakob disease, normal pressure hydrocephalus, amyotrophic lateral sclerosis, Huntington's disease, tauopathy disease, Nasu-Hakola disease, stroke, acute trauma, chronic trauma, cognitive deficit, memory loss, lupus, acute and chronic colitis, rheumatoid arthritis, wound healing, Crohn's disease, inflammatory bowel disease, ulcerative colitis, obesity, malaria, essential tremor, central nervous system lupus, Behcet's disease, Parkinson's disease, dementia with Lewy bodies, multiple system atrophy, Shy-Drager syndrome, progressive supranuclear palsy, cortical basal ganglionic degeneration, acute disseminated encephalomyelitis, granulomartous disorders, sarcoidosis, diseases of aging, seizures, spinal cord injury, traumatic brain injury, age related macular degeneration, glaucoma, retinitis pigmentosa, retinal degeneration, respiratory tract infection, sepsis, eye infection, systemic infection, lupus, arthritis, multiple sclerosis, low bone density, osteoporosis, osteogenesis, osteopetrotic disease, Paget's disease of bone, cancer, bladder cancer, brain cancer, breast cancer, colon cancer, rectal cancer, endometrial cancer, kidney cancer, renal cell cancer, renal pelvis cancer, leukemia, lung cancer, melanoma, non-Hodgkin's lymphoma, pancreatic cancer, prostate cancer, ovarian cancer, fibrosarcoma, acute lymphoblastic leukemia (ALL), acute myeloid leukemia (AML), chronic lymphocytic leukemia (CLL), chronic myeloid leukemia (CML), multiple myeloma, polycythemia vera, essential thrombocytosis, primary or idiopathic myelofibrosis, primary or idiopathic myelosclerosis, myeloid-derived tumors, tumors that express TREM2, thyroid cancer, infections, CNS herpes, parasitic infections, Trypanosome infection, Cruzi infection, Pseudomonas aeruginosa infection, Leishmania donovani infection, group B Streptococcus infection, Campylobacter jejuni infection, Neisseria meningiditis infection, type I HIV, and Haemophilus influenza, comprising administering to an individual in need thereof a therapeutically effective amount of an agent that does not inhibit interaction between TREM2 and one or more TREM2 ligands, and/or enhance one or more activities of at least one TREM2 ligand. Other aspects of the present disclosure relate to an agent that does not inhibit interaction between TREM2 and one or more TREM2 ligands, and/or enhance one or more activities of at least one TREM2 ligand, for use in preventing, reducing risk, or treating a disease, disorder, or injury selected from dementia, frontotemporal dementia, Alzheimer's disease, vascular dementia, mixed dementia, Creutzfeldt-Jakob disease, normal pressure hydrocephalus, amyotrophic lateral sclerosis, Huntington's disease, tauopathy disease, Nasu-Hakola disease, stroke, acute trauma, chronic trauma, cognitive deficit, memory loss, lupus, acute and chronic colitis, rheumatoid arthritis, wound healing, Crohn's disease, inflammatory bowel disease, ulcerative colitis, obesity, malaria, essential tremor, central nervous system lupus, Behcet's disease, Parkinson's disease, dementia with Lewy bodies, multiple system atrophy, Shy-Drager syndrome, progressive supranuclear palsy, cortical basal ganglionic degeneration, acute disseminated encephalomyelitis, granulomartous disorders, sarcoidosis, diseases of aging, seizures, spinal cord injury, traumatic brain injury, age related macular degeneration, glaucoma, retinitis pigmentosa, retinal degeneration, respiratory tract infection, sepsis, eye infection, systemic infection, lupus, arthritis, multiple sclerosis, low bone density, osteoporosis, osteogenesis, osteopetrotic disease, Paget's disease of bone, cancer, bladder cancer, brain cancer, breast cancer, colon cancer, rectal cancer, endometrial cancer, kidney cancer, renal cell cancer, renal pelvis cancer, leukemia, lung cancer, melanoma, non-Hodgkin's lymphoma, pancreatic cancer, prostate cancer, ovarian cancer, fibrosarcoma, acute lymphoblastic leukemia (ALL), acute myeloid leukemia (AML), chronic lymphocytic leukemia (CLL), chronic myeloid leukemia (CML), multiple myeloma, polycythemia vera, essential thrombocytosis, primary or idiopathic myelofibrosis, primary or idiopathic myelosclerosis, myeloid-derived tumors, tumors that express TREM2, thyroid cancer, infections, CNS herpes, parasitic infections, Trypanosome infection, Cruzi infection, Pseudomonas aeruginosa infection, Leishmania donovani infection, group B Streptococcus infection, Campylobacter jejuni infection, Neisseria meningiditis infection, type I HIV, and Haemophilus influenza.

[0297] DAP12 Binding and Phosphorylation

[0298] In some embodiments, the anti-TREM2 antibodies of the present disclosure may induce binding of TREM2 to DAP12. In other embodiments, the anti-TREM2 antibodies of the present disclosure may induce DAP12 phosphorylation after binding to a TREM2 protein expressed in a cell. In other embodiments, TREM2-mediated DAP12 phosphorylation is induced by one or more SRC family tyrosine kinases. Examples of Src family tyrosine kinases include, without limitation, Src, Syk, Yes, Fyn, Fgr, Lck, Hck, Blk, Lyn, and Frk.

[0299] DAP12 is variously referred to as TYRO protein tyrosine kinase-binding protein, TYROBP, KARAP, and PLOSL. DAP12 is a transmembrane signaling protein that contains an immunoreceptor tyrosine-based activation motif (ITAM) in its cytoplasmic domain. In certain embodiments, the anti-TREM2 and/or anti-DAP12 antibody may induce DAP12 phosphorylation in its ITAM motif. Any method known in the art for determining protein phosphorylation, such as DAP12 phosphorylation, may be used.

[0300] In some embodiments, DAP12 is phosphorylated by SRC family kinases, resulting in the recruitment and activation of the Syk kinase, ZAP70 kinase, or both, to a DAP12/TREM2 complex. Thus, in certain embodiments, the anti-TREM2 antibodies of the present disclosure may recruit Syk, ZAP70, or both to a DAP12/TREM2 complex. Without wishing to be bound by theory, it is believed that anti-TREM2 a antibodies of the present disclosure are useful for preventing, lowering the risk of, or treating conditions and/or diseases associated with decreased levels of DAP12 activity, DAP12 phosphorylation, or recruitment of Syk, ZAP70, or both to a DAP12/TREM2 complex, including dementia, frontotemporal dementia, Alzheimer's disease, vascular dementia, mixed dementia, Creutzfeldt-Jakob disease, normal pressure hydrocephalus, amyotrophic lateral sclerosis, Huntington's disease, tauopathy disease, Nasu-Hakola disease, stroke, acute trauma, chronic trauma, cognitive deficit, memory loss, lupus, acute and chronic colitis, rheumatoid arthritis, wound healing, Crohn's disease, inflammatory bowel disease, ulcerative colitis, obesity, malaria, essential tremor, central nervous system lupus, Behcet's disease, Parkinson's disease, dementia with Lewy bodies, multiple system atrophy, Shy-Drager syndrome, progressive supranuclear palsy, cortical basal ganglionic degeneration, acute disseminated encephalomyelitis, granulomartous disorders, sarcoidosis, diseases of aging, seizures, spinal cord injury, traumatic brain injury, age related macular degeneration, glaucoma, retinitis pigmentosa, retinal degeneration, respiratory tract infection, sepsis, eye infection, systemic infection, lupus, arthritis, multiple sclerosis, low bone density, osteoporosis, osteogenesis, osteopetrotic disease, Paget's disease of bone, cancer, bladder cancer, brain cancer, breast cancer, colon cancer, rectal cancer, endometrial cancer, kidney cancer, renal cell cancer, renal pelvis cancer, leukemia, lung cancer, melanoma, non-Hodgkin's lymphoma, pancreatic cancer, prostate cancer, ovarian cancer, fibrosarcoma, acute lymphoblastic leukemia (ALL), acute myeloid leukemia (AML), chronic lymphocytic leukemia (CLL), chronic myeloid leukemia (CML), multiple myeloma, polycythemia vera, essential thrombocytosis, primary or idiopathic myelofibrosis, primary or idiopathic myelosclerosis, myeloid-derived tumors, tumors that express TREM2, thyroid cancer, infections, CNS herpes, parasitic infections, Trypanosome infection, Cruzi infection, Pseudomonas aeruginosa infection, Leishmania donovani infection, group B Streptococcus infection, Campylobacter jejuni infection, Neisseria meningiditis infection, type I HIV, and Haemophilus influenza, comprising administering to an individual in need thereof a therapeutically effective amount of an agent that does not inhibit interaction between TREM2 and one or more TREM2 ligands, and/or enhance one or more activities of one or more TREM2 ligands, Other aspects of the present disclosure relate to an agent does not inhibit interaction between TREM2 and one or more TREM2 ligands, and/or enhance one or more activities of one or more TREM2 ligands, use in preventing, reducing risk, or treating a disease, disorder, or injury selected from dementia, frontotemporal dementia, Alzheimer's disease, vascular dementia, mixed dementia, Creutzfeldt-Jakob disease, normal pressure hydrocephalus, amyotrophic lateral sclerosis, Huntington's disease, tauopathy disease, Nasu-Hakola disease, stroke, acute trauma, chronic trauma, cognitive deficit, memory loss, lupus, acute and chronic colitis, rheumatoid arthritis, wound healing, Crohn's disease, inflammatory bowel disease, ulcerative colitis, obesity, malaria, essential tremor, central nervous system lupus, Behcet's disease, Parkinson's disease, dementia with Lewy bodies, multiple system atrophy, Shy-Drager syndrome, progressive supranuclear palsy, cortical basal ganglionic degeneration, acute disseminated encephalomyelitis, granulomartous disorders, sarcoidosis, diseases of aging, seizures, spinal cord injury, traumatic brain injury, age related macular degeneration, glaucoma, retinitis pigmentosa, retinal degeneration, respiratory tract infection, sepsis, eye infection, systemic infection, lupus, arthritis, multiple sclerosis, low bone density, osteoporosis, osteogenesis, osteopetrotic disease, Paget's disease of bone, cancer, bladder cancer, brain cancer, breast cancer, colon cancer, rectal cancer, endometrial cancer, kidney cancer, renal cell cancer, renal pelvis cancer, leukemia, lung cancer, melanoma, non-Hodgkin's lymphoma, pancreatic cancer, prostate cancer, ovarian cancer, fibrosarcoma, acute lymphoblastic leukemia (ALL), acute myeloid leukemia (AML), chronic lymphocytic leukemia (CLL), chronic myeloid leukemia (CML), multiple myeloma, polycythemia vera, essential thrombocytosis, primary or idiopathic myelofibrosis, primary or idiopathic myelosclerosis, myeloid-derived tumors, tumors that express TREM2, thyroid cancer, infections, CNS herpes, parasitic infections, Trypanosome infection, Cruzi infection, Pseudomonas aeruginosa infection, Leishmania donovani infection, group B Streptococcus infection, Campylobacter jejuni infection, Neisseria meningiditis infection, type I HIV, and Haemophilus influenza.

[0301] Modulated Expression of C-C Chemokine Receptor 7

[0302] In some embodiments, the anti-TREM2 antibodies of the present disclosure may modulate (e.g., increase or decrease) expression of C-C chemokine receptor 7 (CCR7) after binding to a TREM2 protein expressed in a cell. Modulated expression may include, without limitation, modulation in gene expression, modulation in transcriptional expression, or modulation in protein expression. Any method known in the art for determining gene, transcript (e.g., mRNA), and/or protein expression may be used. For example, Northern blot analysis may be used to determine anti-inflammatory mediator gene expression levels, RT-PCR may be used to determine the level of anti-inflammatory mediator transcription, and Western blot analysis may be used to determine anti-inflammatory mediator protein levels.

[0303] C-C chemokine receptor 7 (CCR7) is a member of the G protein-coupled receptor family. CCR7 is expressed in various lymphoid tissues and can activate B-cells and T-cells. In some embodiments, CCR7 may modulate the migration of memory T-cells to secondary lymphoid organs, such as lymph nodes. In other embodiments, CCR7 may stimulate dendritic cell maturation. CCR7 is a receptor protein that can bind the chemokine (C-C motif) ligands CCL19/ELC and CCL21.

[0304] As used herein, CCR7 may have modulated (e.g., increased or decreased) expression if its expression in one or more cells of a subject treated with an anti-TREM2 antibody of the present disclosure is modulated as compared to the expression of CCR7 expressed in one or more cells of a corresponding subject that is not treated with the anti-TREM2 antibody. In some embodiments, an anti-TREM2 antibody of the present disclosure may modulate CCR7 expression in one or more cells of a subject by at least 10%, at least 15%, at least 20%, at least 25%, at least 30%, at least 35%, at least 40%, at least 45%, at least 50%, at least 55%, at least 60%, at least 65%, at least 70%, at least 75%, at least 80%, at least 85%, at least 90%, at least 95%, at least 100%, at least 110%, at least 115%, at least 120%, at least 125%, at least 130%, at least 135%, at least 140%, at least 145%, at least 150%, at least 160%, at least 170%, at least 180%, at least 190%, or at least 200% for example, as compared to CCR7 expression in one or more cells of a corresponding subject that is not treated with the anti-TREM2 antibody. In other embodiments, an anti-TREM2 antibody of the present disclosure modulates CCR7 expression in one or more cells of a subject by at least 1.5 fold, at least 1.6 fold, at least 1.7 fold, at least 1.8 fold, at least 1.9 fold, at least 2.0 fold, at least 2.1 fold, at least 2.15 fold, at least 2.2 fold, at least 2.25 fold, at least 2.3 fold, at least 2.35 fold, at least 2.4 fold, at least 2.45 fold, at least 2.5 fold, at least 2.55 fold, at least 3.0 fold, at least 3.5 fold, at least 4.0 fold, at least 4.5 fold, at least 5.0 fold, at least 5.5 fold, at least 6.0 fold, at least 6.5 fold, at least 7.0 fold, at least 7.5 fold, at least 8.0 fold, at least 8.5 fold, at least 9.0 fold, at least 9.5 fold, or at least 10 fold, for example, as compared to CCR7 expression in one or more cells of a corresponding subject that is not treated with the anti-TREM2 antibody.

[0305] In some embodiments, modulated expression of CCR7 occurs in macrophages, dendritic cells, and/or microglial cells. Increased expression of CCR7 may induce microglial cell chemotaxis toward cells expressing the chemokines CCL19 and CCL21. Accordingly, in certain embodiments, anti-TREM2 antibodies of the present disclosure may induce microglial cell chemotaxis toward CCL19 and CCL21 expressing cells.

[0306] In some embodiments, anti-TREM2 antibodies of the present disclosure may be useful for preventing, lowering the risk of, or treating conditions and/or diseases associated with abnormal levels of CCR7, including dementia, frontotemporal dementia, Alzheimer's disease, Nasu-Hakola disease, Parkinson's disease, Amyotrophic lateral sclerosis, Huntington's disease, and tauopathy disease.

[0307] Modulated Expression of Genes Induced by Inflammation

[0308] In some embodiments, the anti-TREM2 antibodies of the present disclosure may modulate (e.g., increase or decrease) expression of one or more genes whose expression is increased upon induction of inflammation after binding to a TREM2 protein expressed in a cell. Examples of such genes include, without limitation, Fabp3, Fabp5, and LDR. Modulated expression may include, without limitation, modulation in gene expression, modulation in transcriptional expression, or modulation in protein expression. Any method known in the art for determining gene, transcript (e.g., mRNA), and/or protein expression may be used. For example, Northern blot analysis may be used to determine anti-inflammatory mediator gene expression levels, RT-PCR may be used to determine the level of anti-inflammatory mediator transcription, and Western blot analysis may be used to determine anti-inflammatory mediator protein levels.

[0309] As used herein, the one or more genes (e.g., Fabp3, Fabp5, and/or LDR) may have modulated (e.g., increased or decreased) expression if expression in one or more cells of a subject treated with an anti-TREM2 antibody of the present disclosure is modulated as compared to the expression of the one or more genes expressed in one or more cells of a corresponding subject that is not treated with the anti-TREM2 antibody. In some embodiments, an anti-TREM2 antibody of the present disclosure may modulate gene (e.g., Fabp3, Fabp5, and/or LDR) expression in one or more cells of a subject by at least 10%, at least 15%, at least 20%, at least 25%, at least 30%, at least 35%, at least 40%, at least 45%, at least 50%, at least 55%, at least 60%, at least 65%, at least 70%, at least 75%, at least 80%, at least 85%, at least 90%, at least 95%, at least 100%, at least 110%, at least 115%, at least 120%, at least 125%, at least 130%, at least 135%, at least 140%, at least 145%, at least 150%, at least 160%, at least 170%, at least 180%, at least 190%, or at least 200% for example, as compared to gene (e.g., Fabp3, Fabp5, and/or LDR) expression in one or more cells of a corresponding subject that is not treated with the anti-TREM2 antibody. In other embodiments, an anti-TREM2 antibody of the present disclosure modulates gene (e.g., Fabp3, Fabp5, and/or LDR) expression in one or more cells of a subject by at least 1.5 fold, at least 1.6 fold, at least 1.7 fold, at least 1.8 fold, at least 1.9 fold, at least 2.0 fold, at least 2.1 fold, at least 2.15 fold, at least 2.2 fold, at least 2.25 fold, at least 2.3 fold, at least 2.35 fold, at least 2.4 fold, at least 2.45 fold, at least 2.5 fold, at least 2.55 fold, at least 3.0 fold, at least 3.5 fold, at least 4.0 fold, at least 4.5 fold, at least 5.0 fold, at least 5.5 fold, at least 6.0 fold, at least 6.5 fold, at least 7.0 fold, at least 7.5 fold, at least 8.0 fold, at least 8.5 fold, at least 9.0 fold, at least 9.5 fold, or at least 10 fold, for example, as compared to gene (e.g., Fabp3, Fabp5, and/or LDR) expression in one or more cells of a corresponding subject that is not treated with the anti-TREM2 antibody.

[0310] Enhancement or Normalization of the Ability of Bone Marrow-Derived Dendritic Cells to Prime or Modulate Function of Antigen-Specific T-Cells

[0311] In some embodiments, the anti-TREM2 antibodies of the present disclosure may enhance and/or normalize the ability of bone marrow-derived dendritic cells to prime or modulate function of antigen-specific T cells, including of CD8+ T cells, CD4+ T cells, and/or regulatory T cells, after binding to a TREM2 protein expressed in a cell.

[0312] In some embodiments, agonist anti-TREM2 antibodies of the present disclosure may enhance and/or normalize the ability of bone marrow-derived dendritic cells to prime or modulate function of one or more antigen-specific T cells in a subject by at least 10%, at least 15%, at least 20%, at least 25%, at least 30%, at least 35%, at least 40%, at least 45%, at least 50%, at least 55%, at least 60%, at least 65%, at least 70%, at least 75%, at least 80%, at least 85%, at least 90%, at least 95%, at least 100%, at least 110%, at least 115%, at least 120%, at least 125%, at least 130%, at least 135%, at least 140%, at least 145%, at least 150%, at least 160%, at least 170%, at least 180%, at least 190%, or at least 200% for example, as compared to the ability of bone marrow-derived dendritic cells to prime or modulate function of one or more antigen-specific T cells in a corresponding subject that is not treated with the agonist anti-TREM2 antibody. In other embodiments, the agonist anti-TREM2 antibody may enhance and/or normalize the ability of bone marrow-derived dendritic cells to prime or modulate function of antigen-specific T cells in a subject by at least 1.5 fold, at least 1.6 fold, at least 1.7 fold, at least 1.8 fold, at least 1.9 fold, at least 2.0 fold, at least 2.1 fold, at least 2.15 fold, at least 2.2 fold, at least 2.25 fold, at least 2.3 fold, at least 2.35 fold, at least 2.4 fold, at least 2.45 fold, at least 2.5 fold, at least 2.55 fold, at least 3.0 fold, at least 3.5 fold, at least 4.0 fold, at least 4.5 fold, at least 5.0 fold, at least 5.5 fold, at least 6.0 fold, at least 6.5 fold, at least 7.0 fold, at least 7.5 fold, at least 8.0 fold, at least 8.5 fold, at least 9.0 fold, at least 9.5 fold, or at least 10 fold, for example, as compared to the ability of bone marrow-derived dendritic cells to prime or modulate function of antigen-specific T cells in a corresponding subject that is not treated with the agonist anti-TREM2 antibody.

[0313] In some embodiments, anti-TREM2 antibodies of the present disclosure may be beneficial for preventing, lowering the risk of, or treating conditions and/or diseases associated with a decreased or deregulated ability of bone marrow-derived dendritic cells to prime or modulate function of antigen-specific T cells, including dementia, frontotemporal dementia, Alzheimer's disease, vascular dementia, mixed dementia, Creutzfeldt-Jakob disease, normal pressure hydrocephalus, amyotrophic lateral sclerosis, Huntington's disease, tauopathy disease, Nasu-Hakola disease, stroke, acute trauma, chronic trauma, cognitive deficit, memory loss, lupus, acute and chronic colitis, rheumatoid arthritis, wound healing, Crohn's disease, inflammatory bowel disease, ulcerative colitis, obesity, malaria, essential tremor, central nervous system lupus, Behcet's disease, Parkinson's disease, dementia with Lewy bodies, multiple system atrophy, Shy-Drager syndrome, progressive supranuclear palsy, cortical basal ganglionic degeneration, acute disseminated encephalomyelitis, granulomartous disorders, sarcoidosis, diseases of aging, seizures, spinal cord injury, traumatic brain injury, age related macular degeneration, glaucoma, retinitis pigmentosa, retinal degeneration, respiratory tract infection, sepsis, eye infection, systemic infection, lupus, arthritis, multiple sclerosis, low bone density, osteoporosis, osteogenesis, osteopetrotic disease, Paget's disease of bone, cancer, bladder cancer, brain cancer, breast cancer, colon cancer, rectal cancer, endometrial cancer, kidney cancer, renal cell cancer, renal pelvis cancer, leukemia, lung cancer, melanoma, non-Hodgkin's lymphoma, pancreatic cancer, prostate cancer, ovarian cancer, fibrosarcoma, acute lymphoblastic leukemia (ALL), acute myeloid leukemia (AML), chronic lymphocytic leukemia (CLL), chronic myeloid leukemia (CML), multiple myeloma, polycythemia vera, essential thrombocytosis, primary or idiopathic myelofibrosis, primary or idiopathic myelosclerosis, myeloid-derived tumors, tumors that express TREM2, thyroid cancer, infections, CNS herpes, parasitic infections, Trypanosome infection, Cruzi infection, Pseudomonas aeruginosa infection, Leishmania donovani infection, group B Streptococcus infection, Campylobacter jejuni infection, Neisseria meningiditis infection, type I HIV, and Haemophilus influenza, comprising administering to an individual in need thereof a therapeutically effective amount of an agent that does not inhibit interaction between TREM2 and one or more TREM2 ligands, and/or enhance one or more activities of one or more TREM2 ligands. Other aspects of the present disclosure relate to an agent that does not inhibit interaction between TREM2 and one or more TREM2 ligands, and/or enhance one or more activities of one or more TREM2 ligands for use in preventing, reducing risk, or treating a disease, disorder, or injury selected from dementia, frontotemporal dementia, Alzheimer's disease, vascular dementia, mixed dementia, Creutzfeldt-Jakob disease, normal pressure hydrocephalus, amyotrophic lateral sclerosis, Huntington's disease, tauopathy disease, Nasu-Hakola disease, stroke, acute trauma, chronic trauma, cognitive deficit, memory loss, lupus, acute and chronic colitis, rheumatoid arthritis, wound healing, Crohn's disease, inflammatory bowel disease, ulcerative colitis, obesity, malaria, essential tremor, central nervous system lupus, Behcet's disease, Parkinson's disease, dementia with Lewy bodies, multiple system atrophy, Shy-Drager syndrome, progressive supranuclear palsy, cortical basal ganglionic degeneration, acute disseminated encephalomyelitis, granulomartous disorders, sarcoidosis, diseases of aging, seizures, spinal cord injury, traumatic brain injury, age related macular degeneration, glaucoma, retinitis pigmentosa, retinal degeneration, respiratory tract infection, sepsis, eye infection, systemic infection, lupus, arthritis, multiple sclerosis, low bone density, osteoporosis, osteogenesis, osteopetrotic disease, Paget's disease of bone, cancer, bladder cancer, brain cancer, breast cancer, colon cancer, rectal cancer, endometrial cancer, kidney cancer, renal cell cancer, renal pelvis cancer, leukemia, lung cancer, melanoma, non-Hodgkin's lymphoma, pancreatic cancer, prostate cancer, ovarian cancer, fibrosarcoma, acute lymphoblastic leukemia (ALL), acute myeloid leukemia (AML), chronic lymphocytic leukemia (CLL), chronic myeloid leukemia (CML), multiple myeloma, polycythemia vera, essential thrombocytosis, primary or idiopathic myelofibrosis, primary or idiopathic myelosclerosis, myeloid-derived tumors, tumors that express TREM2, thyroid cancer, infections, CNS herpes, parasitic infections, Trypanosome infection, Cruzi infection, Pseudomonas aeruginosa infection, Leishmania donovani infection, group B Streptococcus infection, Campylobacter jejuni infection, Neisseria meningiditis infection, type I HIV, and Haemophilus influenza.

[0314] Osteoclast Production

[0315] In some embodiments, the anti-TREM2 antibodies of the present disclosure may induce osteoclast production and/or increase the rate of osteoclastogenesis after binding to a TREM2 protein expressed in a cell.

[0316] As used herein, an osteoclast is a type of bone cell that can remove bone tissue by removing its mineralized matrix and breaking up the organic bone (e.g., bone resorption). Osteoclasts can be formed by the fusion of cells of the monocyte-macrophage cell line. In some embodiments, osteoclasts may be characterized by high expression of tartrate resistant acid phosphatase (TRAP) and cathepsin K.

[0317] As used herein, the rate of osteoclastogenesis may be increased if the rate of osteoclastogenesis in a subject treated with an agonist anti-TREM2 antibody of the present disclosure is greater than the rate of osteoclastogenesis in a corresponding subject that is not treated with the agonist anti-TREM2 antibody. In some embodiments, an agonist anti-TREM2 antibody of the present disclosure may increase the rate of osteoclastogenesis in a subject by at least 10%, at least 15%, at least 20%, at least 25%, at least 30%, at least 35%, at least 40%, at least 45%, at least 50%, at least 55%, at least 60%, at least 65%, at least 70%, at least 75%, at least 80%, at least 85%, at least 90%, at least 95%, at least 100%, at least 110%, at least 115%, at least 120%, at least 125%, at least 130%, at least 135%, at least 140%, at least 145%, at least 150%, at least 160%, at least 170%, at least 180%, at least 190%, or at least 200% for example, as compared to rate of osteoclastogenesis in a corresponding subject that is not treated with the agonist anti-TREM2 antibody. In other embodiments, an agonist anti-TREM2 antibody of the present disclosure may increase the rate of osteoclastogenesis in a subject by at least 1.5 fold, at least 1.6 fold, at least 1.7 fold, at least 1.8 fold, at least 1.9 fold, at least 2.0 fold, at least 2.1 fold, at least 2.15 fold, at least 2.2 fold, at least 2.25 fold, at least 2.3 fold, at least 2.35 fold, at least 2.4 fold, at least 2.45 fold, at least 2.5 fold, at least 2.55 fold, at least 3.0 fold, at least 3.5 fold, at least 4.0 fold, at least 4.5 fold, at least 5.0 fold, at least 5.5 fold, at least 6.0 fold, at least 6.5 fold, at least 7.0 fold, at least 7.5 fold, at least 8.0 fold, at least 8.5 fold, at least 9.0 fold, at least 9.5 fold, or at least 10 fold, for example, as compared to rate of osteoclastogenesis in a corresponding subject that is not treated with the agonist anti-TREM2 antibody.

[0318] As used herein, the rate of osteoclastogenesis may be decreased if the rate of osteoclastogenesis in a subject treated with an antagonist anti-TREM2 antibody of the present disclosure is smaller than the rate of osteoclastogenesis in a corresponding subject that is not treated with the antagonist anti-TREM2 antibody. In some embodiments, an antagonist anti-TREM2 antibody of the present disclosure may decrease the rate of osteoclastogenesis in a subject by at least 10%, at least 15%, at least 20%, at least 25%, at least 30%, at least 35%, at least 40%, at least 45%, at least 50%, at least 55%, at least 60%, at least 65%, at least 70%, at least 75%, at least 80%, at least 85%, at least 90%, at least 95%, at least 100%, at least 110%, at least 115%, at least 120%, at least 125%, at least 130%, at least 135%, at least 140%, at least 145%, at least 150%, at least 160%, at least 170%, at least 180%, at least 190%, or at least 200% for example, as compared to rate of osteoclastogenesis in a corresponding subject that is not treated with the antagonist anti-TREM2 antibody. In other embodiments, an antagonist anti-TREM2 antibody of the present disclosure may decrease the rate of osteoclastogenesis in a subject by at least 1.5 fold, at least 1.6 fold, at least 1.7 fold, at least 1.8 fold, at least 1.9 fold, at least 2.0 fold, at least 2.1 fold, at least 2.15 fold, at least 2.2 fold, at least 2.25 fold, at least 2.3 fold, at least 2.35 fold, at least 2.4 fold, at least 2.45 fold, at least 2.5 fold, at least 2.55 fold, at least 3.0 fold, at least 3.5 fold, at least 4.0 fold, at least 4.5 fold, at least 5.0 fold, at least 5.5 fold, at least 6.0 fold, at least 6.5 fold, at least 7.0 fold, at least 7.5 fold, at least 8.0 fold, at least 8.5 fold, at least 9.0 fold, at least 9.5 fold, or at least 10 fold, for example, as compared to rate of osteoclastogenesis in a corresponding subject that is not treated with the antagonist anti-TREM2 antibody.

[0319] In some embodiments, anti-TREM2 antibodies of the present disclosure may be beneficial for preventing, lowering the risk of, or treating conditions and/or diseases associated with abnormal bone formation and maintenance including osteoporosis, which is associated with pathological decrease in bone density and osteoporotic diseases which are associated with pathological increase in bone density.

[0320] Proliferation, Survival and Functionality of TREM2-Expressing Cells

[0321] In some embodiments, the anti-TREM2 antibodies of the present disclosure may increase the proliferation, survival, and/or function of dendritic cells, macrophages, monocytes, osteoclasts, Langerhans cells of skin, Kupffer cells, and microglial cells (microglia) after binding to TREM2 protein expressed in a cell. In some embodiments, the anti-TREM2 antibodies of the present disclosure do not inhibit the growth (e.g., proliferation and/or survival) of one or more innate immune cells.

[0322] Microglial cells are a type of glial cell that are the resident macrophages of the brain and spinal cord, and thus act as the first and main form of active immune defense in the central nervous system (CNS). Microglial cells constitute 20% of the total glial cell population within the brain. Microglial cells are constantly scavenging the CNS for plaques, damaged neurons and infectious agents. The brain and spinal cord are considered “immune privileged” organs in that they are separated from the rest of the body by a series of endothelial cells known as the blood-brain barrier, which prevents most infections from reaching the vulnerable nervous tissue. In the case where infectious agents are directly introduced to the brain or cross the blood-brain barrier, microglial cells must react quickly to decrease inflammation and destroy the infectious agents before they damage the sensitive neural tissue. Due to the unavailability of antibodies from the rest of the body (few antibodies are small enough to cross the blood brain barrier), microglia must be able to recognize foreign bodies, swallow them, and act as antigen-presenting cells activating T-cells. Since this process must be done quickly to prevent potentially fatal damage, microglial cells are extremely sensitive to even small pathological changes in the CNS. They achieve this sensitivity in part by having unique potassium channels that respond to even small changes in extracellular potassium.

[0323] As used herein, macrophages of the present disclosure include, without limitation, M1 macrophages, activated M1 macrophages, and M2 macrophages. As used herein, microglial cells of the present disclosure include, without limitation, M1 microglial cells, activated M1 microglial cells, and M2 microglial cells. In some embodiments, anti-TREM2 antibodies of the present disclosure may be beneficial for, lowering the risk of, or treating conditions and/or diseases associated with decreased proliferation or survival, of immune cells, including dementia, frontotemporal dementia, Alzheimer's disease, vascular dementia, mixed dementia, Creutzfeldt-Jakob disease, normal pressure hydrocephalus, amyotrophic lateral sclerosis, Huntington's disease, tauopathy disease, Nasu-Hakola disease, stroke, acute trauma, chronic trauma, cognitive deficit, memory loss, lupus, acute and chronic colitis, rheumatoid arthritis, wound healing, Crohn's disease, inflammatory bowel disease, ulcerative colitis, obesity, malaria, essential tremor, central nervous system lupus, Behcet's disease, Parkinson's disease, dementia with Lewy bodies, multiple system atrophy, Shy-Drager syndrome, progressive supranuclear palsy, cortical basal ganglionic degeneration, acute disseminated encephalomyelitis, granulomartous disorders, sarcoidosis, diseases of aging, seizures, spinal cord injury, traumatic brain injury, age related macular degeneration, glaucoma, retinitis pigmentosa, retinal degeneration, respiratory tract infection, sepsis, eye infection, systemic infection, lupus, arthritis, multiple sclerosis, low bone density, osteoporosis, osteogenesis, osteopetrotic disease, Paget's disease of bone, cancer, bladder cancer, brain cancer, breast cancer, colon cancer, rectal cancer, endometrial cancer, kidney cancer, renal cell cancer, renal pelvis cancer, leukemia, lung cancer, melanoma, non-Hodgkin's lymphoma, pancreatic cancer, prostate cancer, ovarian cancer, fibrosarcoma, acute lymphoblastic leukemia (ALL), acute myeloid leukemia (AML), chronic lymphocytic leukemia (CLL), chronic myeloid leukemia (CML), multiple myeloma, polycythemia vera, essential thrombocytosis, primary or idiopathic myelofibrosis, primary or idiopathic myelosclerosis, myeloid-derived tumors, tumors that express TREM2, thyroid cancer, infections, CNS herpes, parasitic infections, Trypanosome infection, Cruzi infection, Pseudomonas aeruginosa infection, Leishmania donovani infection, group B Streptococcus infection, Campylobacter jejuni infection, Neisseria meningiditis infection, type I HIV, and Haemophilus influenza, comprising administering to an individual in need thereof a therapeutically effective amount of an agent that does not inhibit interaction between TREM2 and one or more TREM2 ligands, and/or enhance one or more activities of one or more TREM2 ligands. Other aspects of the present disclosure relate to an agent that does not inhibit interaction between TREM2 and one or more TREM2 ligands, and/or enhance one or more activities of one or more TREM2 ligands for use in preventing, reducing risk, or treating a disease, disorder, or injury selected from dementia, frontotemporal dementia, Alzheimer's disease, vascular dementia, mixed dementia, Creutzfeldt-Jakob disease, normal pressure hydrocephalus, amyotrophic lateral sclerosis, Huntington's disease, tauopathy disease, Nasu-Hakola disease, stroke, acute trauma, chronic trauma, cognitive deficit, memory loss, lupus, acute and chronic colitis, rheumatoid arthritis, wound healing, Crohn's disease, inflammatory bowel disease, ulcerative colitis, obesity, malaria, essential tremor, central nervous system lupus, Behcet's disease, Parkinson's disease, dementia with Lewy bodies, multiple system atrophy, Shy-Drager syndrome, progressive supranuclear palsy, cortical basal ganglionic degeneration, acute disseminated encephalomyelitis, granulomartous disorders, sarcoidosis, diseases of aging, seizures, spinal cord injury, traumatic brain injury, age related macular degeneration, glaucoma, retinitis pigmentosa, retinal degeneration, respiratory tract infection, sepsis, eye infection, systemic infection, lupus, arthritis, multiple sclerosis, low bone density, osteoporosis, osteogenesis, osteopetrotic disease, Paget's disease of bone, cancer, bladder cancer, brain cancer, breast cancer, colon cancer, rectal cancer, endometrial cancer, kidney cancer, renal cell cancer, renal pelvis cancer, leukemia, lung cancer, melanoma, non-Hodgkin's lymphoma, pancreatic cancer, prostate cancer, ovarian cancer, fibrosarcoma, acute lymphoblastic leukemia (ALL), acute myeloid leukemia (AML), chronic lymphocytic leukemia (CLL), chronic myeloid leukemia (CML), multiple myeloma, polycythemia vera, essential thrombocytosis, primary or idiopathic myelofibrosis, primary or idiopathic myelosclerosis, myeloid-derived tumors, tumors that express TREM2, thyroid cancer, infections, CNS herpes, parasitic infections, Trypanosome infection, Cruzi infection, Pseudomonas aeruginosa infection, Leishmania donovani infection, group B Streptococcus infection, Campylobacter jejuni infection, Neisseria meningiditis infection, type I HIV, and Haemophilus influenza.

[0324] In some embodiments, anti-TREM2 antibodies of the present disclosure may increase the expression of CD83 and/or CD86 on dendritic cells, monocytes, and/or macrophages.

[0325] As used herein, the rate of proliferation, survival, and/or function of macrophages, dendritic cells, monocytes, and/or microglia may include increased expression if the rate of proliferation, survival, and/or function of dendritic cells, macrophages, monocytes, osteoclasts, Langerhans cells of skin, Kupffer cells, and/or microglia in a subject treated with an anti-TREM2 antibody of the present disclosure is greater than the rate of proliferation, survival, and/or function of dendritic cells, macrophages, monocytes, osteoclasts, Langerhans cells of skin, Kupffer cells, and/or microglia in a corresponding subject that is not treated with the anti-TREM2 antibody. In some embodiments, an anti-TREM2 antibody of the present disclosure may increase the rate of proliferation, survival, and/or function of dendritic cells, macrophages, monocytes, osteoclasts, Langerhans cells of skin, Kupffer cells, and/or microglia in a subject by at least 10%, at least 15%, at least 20%, at least 25%, at least 30%, at least 35%, at least 40%, at least 45%, at least 50%, at least 55%, at least 60%, at least 65%, at least 70%, at least 75%, at least 80%, at least 85%, at least 90%, at least 95%, at least 100%, at least 110%, at least 115%, at least 120%, at least 125%, at least 130%, at least 135%, at least 140%, at least 145%, at least 150%, at least 160%, at least 170%, at least 180%, at least 190%, or at least 200% for example, as compared to the rate of proliferation, survival, and/or function of dendritic cells, macrophages, monocytes, osteoclasts, Langerhans cells of skin, Kupffer cells, and/or microglia in a corresponding subject that is not treated with the anti-TREM2 antibody. In other embodiments, an anti-TREM2 antibody of the present disclosure may increase the rate of proliferation, survival, and/or function of dendritic cells, macrophages, monocytes, osteoclasts, Langerhans cells of skin, Kupffer cells, and/or microglia in a subject by at least 1.5 fold, at least 1.6 fold, at least 1.7 fold, at least 1.8 fold, at least 1.9 fold, at least 2.0 fold, at least 2.1 fold, at least 2.15 fold, at least 2.2 fold, at least 2.25 fold, at least 2.3 fold, at least 2.35 fold, at least 2.4 fold, at least 2.45 fold, at least 2.5 fold, at least 2.55 fold, at least 3.0 fold, at least 3.5 fold, at least 4.0 fold, at least 4.5 fold, at least 5.0 fold, at least 5.5 fold, at least 6.0 fold, at least 6.5 fold, at least 7.0 fold, at least 7.5 fold, at least 8.0 fold, at least 8.5 fold, at least 9.0 fold, at least 9.5 fold, or at least 10 fold, for example, as compared to the rate of proliferation, survival, and/or function of dendritic cells, macrophages, monocytes, osteoclasts, Langerhans cells of skin, Kupffer cells, and/or microglia in a corresponding subject that is not treated with the anti-TREM2 antibody.

[0326] In some embodiments, anti-TREM2 antibodies of the present disclosure may be beneficial for preventing, lowering the risk of, or treating conditions and/or diseases associated with a reduction in function of dendritic cells, macrophages, monocytes, osteoclasts, Langerhans cells of skin, Kupffer cells, and/or microglia including dementia, frontotemporal dementia, Alzheimer's disease, vascular dementia, mixed dementia, Creutzfeldt-Jakob disease, normal pressure hydrocephalus, amyotrophic lateral sclerosis, Huntington's disease, tauopathy disease, Nasu-Hakola disease, stroke, acute trauma, chronic trauma, cognitive deficit, memory loss, lupus, acute and chronic colitis, rheumatoid arthritis, wound healing, Crohn's disease, inflammatory bowel disease, ulcerative colitis, obesity, malaria, essential tremor, central nervous system lupus, Behcet's disease, Parkinson's disease, dementia with Lewy bodies, multiple system atrophy, Shy-Drager syndrome, progressive supranuclear palsy, cortical basal ganglionic degeneration, acute disseminated encephalomyelitis, granulomartous disorders, sarcoidosis, diseases of aging, seizures, spinal cord injury, traumatic brain injury, age related macular degeneration, glaucoma, retinitis pigmentosa, retinal degeneration, respiratory tract infection, sepsis, eye infection, systemic infection, lupus, arthritis, multiple sclerosis, low bone density, osteoporosis, osteogenesis, osteopetrotic disease, Paget's disease of bone, cancer, bladder cancer, brain cancer, breast cancer, colon cancer, rectal cancer, endometrial cancer, kidney cancer, renal cell cancer, renal pelvis cancer, leukemia, lung cancer, melanoma, non-Hodgkin's lymphoma, pancreatic cancer, prostate cancer, ovarian cancer, fibrosarcoma, acute lymphoblastic leukemia (ALL), acute myeloid leukemia (AML), chronic lymphocytic leukemia (CLL), chronic myeloid leukemia (CML), multiple myeloma, polycythemia vera, essential thrombocytosis, primary or idiopathic myelofibrosis, primary or idiopathic myelosclerosis, myeloid-derived tumors, tumors that express TREM2, thyroid cancer, infections, CNS herpes, parasitic infections, Trypanosome infection, Cruzi infection, Pseudomonas aeruginosa infection, Leishmania donovani infection, group B Streptococcus infection, Campylobacter jejuni infection, Neisseria meningiditis infection, type I HIV, and Haemophilus influenza, comprising administering to an individual in need thereof a therapeutically effective amount of an agent that does not inhibit interaction between TREM2 and one or more TREM2 ligands, and/or enhance one or more activities of at least one TREM2 ligand. Other aspects of the present disclosure relate to an agent that does not inhibit interaction between TREM2 and one or more TREM2 ligands, and/or enhance one or more activities of at least one TREM2 ligand for use in preventing, reducing risk, or treating a disease, disorder, or injury selected from dementia, frontotemporal dementia, Alzheimer's disease, vascular dementia, mixed dementia, Creutzfeldt-Jakob disease, normal pressure hydrocephalus, amyotrophic lateral sclerosis, Huntington's disease, tauopathy disease, Nasu-Hakola disease, stroke, acute trauma, chronic trauma, cognitive deficit, memory loss, lupus, acute and chronic colitis, rheumatoid arthritis, wound healing, Crohn's disease, inflammatory bowel disease, ulcerative colitis, obesity, malaria, essential tremor, central nervous system lupus, Behcet's disease, Parkinson's disease, dementia with Lewy bodies, multiple system atrophy, Shy-Drager syndrome, progressive supranuclear palsy, cortical basal ganglionic degeneration, acute disseminated encephalomyelitis, granulomartous disorders, sarcoidosis, diseases of aging, seizures, spinal cord injury, traumatic brain injury, age related macular degeneration, glaucoma, retinitis pigmentosa, retinal degeneration, respiratory tract infection, sepsis, eye infection, systemic infection, lupus, arthritis, multiple sclerosis, low bone density, osteoporosis, osteogenesis, osteopetrotic disease, Paget's disease of bone, cancer, bladder cancer, brain cancer, breast cancer, colon cancer, rectal cancer, endometrial cancer, kidney cancer, renal cell cancer, renal pelvis cancer, leukemia, lung cancer, melanoma, non-Hodgkin's lymphoma, pancreatic cancer, prostate cancer, ovarian cancer, fibrosarcoma, acute lymphoblastic leukemia (ALL), acute myeloid leukemia (AML), chronic lymphocytic leukemia (CLL), chronic myeloid leukemia (CML), multiple myeloma, polycythemia vera, essential thrombocytosis, primary or idiopathic myelofibrosis, primary or idiopathic myelosclerosis, myeloid-derived tumors, tumors that express TREM2, thyroid cancer, infections, CNS herpes, parasitic infections, Trypanosome infection, Cruzi infection, Pseudomonas aeruginosa infection, Leishmania donovani infection, group B Streptococcus infection, Campylobacter jejuni infection, Neisseria meningiditis infection, type I HIV, and Haemophilus influenza.

[0327] Clearance and Phagocytosis

[0328] In some embodiments, the anti-TREM2 antibodies of the present disclosure may induce clearance and/or phagocytosis after binding to a TREM2 protein expressed in a cell of one or more of apoptotic neurons, nerve tissue debris of the nervous system, non-nerve tissue debris of the nervous system, bacteria, other foreign bodies, disease-causing proteins, disease-causing peptides, disease-causing nucleic acid, or tumor cells. In certain embodiments, disease-causing proteins include, without limitation, amyloid beta or fragments thereof, Tau, IAPP, alpha-synuclein, TDP-43, FUS protein, prion protein, PrPSc, huntingtin, calcitonin, superoxide dismutase, ataxin, Lewy body, atrial natriuretic factor, islet amyloid polypeptide, insulin, apolipoprotein AI, serum amyloid A, medin, prolactin, transthyretin, lysozyme, beta 2 microglobulin, gelsolin, keratoepithelin, cystatin, immunoglobulin light chain AL, S-IBM protein, and Repeat-associated non-ATG (RAN) translation products including DiPeptide Repeats, (DPRs peptides) composed of glycine-alanine (GA), glycine-proline (GP), glycine-arginine (GR), proline-alanine (PA), or proline-arginine (PR). In certain embodiments, disease-causing nucleic acids include, without limitation, antisense GGCCCC (G2C4) repeat-expansion RNA.

[0329] In some embodiments, the anti-TREM2 antibodies of the present disclosure may induce of one or more types of clearance, including without limitation, apoptotic neuron clearance, nerve tissue debris clearance, non-nerve tissue debris clearance, bacteria or other foreign body clearance, disease-causing protein clearance, disease-causing peptide clearance, disease-causing nucleic acid clearance, and tumor cell clearance.

[0330] In some embodiments, the anti-TREM2 antibodies of the present disclosure may induce phagocytosis of one or more of apoptotic neurons, nerve tissue debris, non-nerve tissue debris, bacteria, other foreign bodies, disease-causing proteins, disease-causing peptides, disease-causing nucleic acid, and/or tumor cells.

[0331] In some embodiments, the anti-TREM2 antibodies of the present disclosure may increase phagocytosis by macrophages, dendritic cells, monocytes, and/or microglia under conditions of reduced levels of macrophage colony-stimulating factor (MCSF). Alternatively, in some embodiments, the anti-TREM2 antibodies of the present disclosure may increase phagocytosis by macrophages, dendritic cells, monocytes, and/or microglia in the presence of normal levels of macrophage colony-stimulating factor (MCSF)

[0332] In some embodiments, anti-TREM2 antibodies of the present disclosure may be beneficial for preventing, lowering the risk of, or treating conditions and/or diseases associated with clearance and/or phagocytosis of apoptotic neurons, nerve tissue debris of the nervous system, non-nerve tissue debris of the nervous system, bacteria, other foreign bodies, disease-causing proteins, disease-causing peptides, disease-causing nucleic acid, or tumor cells., including dementia, frontotemporal dementia, Alzheimer's disease, vascular dementia, mixed dementia, Creutzfeldt-Jakob disease, normal pressure hydrocephalus, amyotrophic lateral sclerosis, Huntington's disease, tauopathy disease, Nasu-Hakola disease, stroke, acute trauma, chronic trauma, cognitive deficit, memory loss, lupus, acute and chronic colitis, rheumatoid arthritis, wound healing, Crohn's disease, inflammatory bowel disease, ulcerative colitis, obesity, malaria, essential tremor, central nervous system lupus, Behcet's disease, Parkinson's disease, dementia with Lewy bodies, multiple system atrophy, Shy-Drager syndrome, progressive supranuclear palsy, cortical basal ganglionic degeneration, acute disseminated encephalomyelitis, granulomartous disorders, sarcoidosis, diseases of aging, seizures, spinal cord injury, traumatic brain injury, age related macular degeneration, glaucoma, retinitis pigmentosa, retinal degeneration, respiratory tract infection, sepsis, eye infection, systemic infection, lupus, arthritis, multiple sclerosis, low bone density, osteoporosis, osteogenesis, osteopetrotic disease, Paget's disease of bone, cancer, bladder cancer, brain cancer, breast cancer, colon cancer, rectal cancer, endometrial cancer, kidney cancer, renal cell cancer, renal pelvis cancer, leukemia, lung cancer, melanoma, non-Hodgkin's lymphoma, pancreatic cancer, prostate cancer, ovarian cancer, fibrosarcoma, acute lymphoblastic leukemia (ALL), acute myeloid leukemia (AML), chronic lymphocytic leukemia (CLL), chronic myeloid leukemia (CML), multiple myeloma, polycythemia vera, essential thrombocytosis, primary or idiopathic myelofibrosis, primary or idiopathic myelosclerosis, myeloid-derived tumors, tumors that express TREM2, thyroid cancer, infections, CNS herpes, parasitic infections, Trypanosome infection, Cruzi infection, Pseudomonas aeruginosa infection, Leishmania donovani infection, group B Streptococcus infection, Campylobacter jejuni infection, Neisseria meningiditis infection, type I HIV, and Haemophilus influenza, comprising administering to an individual in need thereof a therapeutically effective amount of an agent that does not inhibit interaction between TREM2 and one or more TREM2 ligand, and/or enhance one or more activities of at least one TREM2 ligand. Other aspects of the present disclosure relate to an agent does not inhibit interaction between TREM2 and i for use in preventing, reducing risk, or treating a disease, disorder, or injury selected from dementia, frontotemporal dementia, Alzheimer's disease, vascular dementia, mixed dementia, Creutzfeldt-Jakob disease, normal pressure hydrocephalus, amyotrophic lateral sclerosis, Huntington's disease, tauopathy disease, Nasu-Hakola disease, stroke, acute trauma, chronic trauma, cognitive deficit, memory loss, lupus, acute and chronic colitis, rheumatoid arthritis, wound healing, Crohn's disease, inflammatory bowel disease, ulcerative colitis, obesity, malaria, essential tremor, central nervous system lupus, Behcet's disease, Parkinson's disease, dementia with Lewy bodies, multiple system atrophy, Shy-Drager syndrome, progressive supranuclear palsy, cortical basal ganglionic degeneration, acute disseminated encephalomyelitis, granulomartous disorders, sarcoidosis, diseases of aging, seizures, spinal cord injury, traumatic brain injury, age related macular degeneration, glaucoma, retinitis pigmentosa, retinal degeneration, respiratory tract infection, sepsis, eye infection, systemic infection, lupus, arthritis, multiple sclerosis, low bone density, osteoporosis, osteogenesis, osteopetrotic disease, Paget's disease of bone, cancer, bladder cancer, brain cancer, breast cancer, colon cancer, rectal cancer, endometrial cancer, kidney cancer, renal cell cancer, renal pelvis cancer, leukemia, lung cancer, melanoma, non-Hodgkin's lymphoma, pancreatic cancer, prostate cancer, ovarian cancer, fibrosarcoma, acute lymphoblastic leukemia (ALL), acute myeloid leukemia (AML), chronic lymphocytic leukemia (CLL), chronic myeloid leukemia (CML), multiple myeloma, polycythemia vera, essential thrombocytosis, primary or idiopathic myelofibrosis, primary or idiopathic myelosclerosis, myeloid-derived tumors, tumors that express TREM2, thyroid cancer, infections, CNS herpes, parasitic infections, Trypanosome infection, Cruzi infection, Pseudomonas aeruginosa infection, Leishmania donovani infection, group B Streptococcus infection, Campylobacter jejuni infection, Neisseria meningiditis infection, type I HIV, and Haemophilus influenza.

[0333] TREM2-Dependent Gene Expression

[0334] In some embodiments, agonist anti-TREM2 antibodies of the present disclosure may increase the activity and/or expression of TREM2-dependent genes, such as one or more transcription factors of the nuclear factor of activated T-cells (NFAT) family of transcription factors. Alternatively, antagonistic anti-TREM2 antibodies of the present disclosure may inhibit the activity and/or expression of TREM2-dependent genes, such as one or more transcription factors of the NFAT family of transcription factors.

[0335] In some embodiments, anti-TREM2 antibodies of the present disclosure may be beneficial for preventing, lowering the risk of, or treating conditions and/or diseases associated with decreased levels of TREM2-dependent genes, including dementia, frontotemporal dementia, Alzheimer's disease, vascular dementia, mixed dementia, Creutzfeldt-Jakob disease, normal pressure hydrocephalus, amyotrophic lateral sclerosis, Huntington's disease, tauopathy disease, Nasu-Hakola disease, stroke, acute trauma, chronic trauma, cognitive deficit, memory loss, lupus, acute and chronic colitis, rheumatoid arthritis, wound healing, Crohn's disease, inflammatory bowel disease, ulcerative colitis, obesity, malaria, essential tremor, central nervous system lupus, Behcet's disease, Parkinson's disease, dementia with Lewy bodies, multiple system atrophy, Shy-Drager syndrome, progressive supranuclear palsy, cortical basal ganglionic degeneration, acute disseminated encephalomyelitis, granulomartous disorders, sarcoidosis, diseases of aging, seizures, spinal cord injury, traumatic brain injury, age related macular degeneration, glaucoma, retinitis pigmentosa, retinal degeneration, respiratory tract infection, sepsis, eye infection, systemic infection, lupus, arthritis, multiple sclerosis, low bone density, osteoporosis, osteogenesis, osteopetrotic disease, Paget's disease of bone, cancer, bladder cancer, brain cancer, breast cancer, colon cancer, rectal cancer, endometrial cancer, kidney cancer, renal cell cancer, renal pelvis cancer, leukemia, lung cancer, melanoma, non-Hodgkin's lymphoma, pancreatic cancer, prostate cancer, ovarian cancer, fibrosarcoma, acute lymphoblastic leukemia (ALL), acute myeloid leukemia (AML), chronic lymphocytic leukemia (CLL), chronic myeloid leukemia (CML), multiple myeloma, polycythemia vera, essential thrombocytosis, primary or idiopathic myelofibrosis, primary or idiopathic myelosclerosis, myeloid-derived tumors, tumors that express TREM2, thyroid cancer, infections, CNS herpes, parasitic infections, Trypanosome infection, Cruzi infection, Pseudomonas aeruginosa infection, Leishmania donovani infection, group B Streptococcus infection, Campylobacter jejuni infection, Neisseria meningiditis infection, type I HIV, and Haemophilus influenza, comprising administering to an individual in need thereof a therapeutically effective amount of an agent that does not inhibit interaction between TREM2 and one or more TREM2 ligands, and/or enhance one or more activities of at least one TREM2 ligand. Other aspects of the present disclosure relate to an agent that does not inhibit interaction between TREM2 and one or more CD33 ligands for use in preventing, reducing risk, or treating a disease, disorder, or injury selected from dementia, frontotemporal dementia, Alzheimer's disease, vascular dementia, mixed dementia, Creutzfeldt-Jakob disease, normal pressure hydrocephalus, amyotrophic lateral sclerosis, Huntington's disease, tauopathy disease, Nasu-Hakola disease, stroke, acute trauma, chronic trauma, cognitive deficit, memory loss, lupus, acute and chronic colitis, rheumatoid arthritis, wound healing, Crohn's disease, inflammatory bowel disease, ulcerative colitis, obesity, malaria, essential tremor, central nervous system lupus, Behcet's disease, Parkinson's disease, dementia with Lewy bodies, multiple system atrophy, Shy-Drager syndrome, progressive supranuclear palsy, cortical basal ganglionic degeneration, acute disseminated encephalomyelitis, granulomartous disorders, sarcoidosis, diseases of aging, seizures, spinal cord injury, traumatic brain injury, age related macular degeneration, glaucoma, retinitis pigmentosa, retinal degeneration, respiratory tract infection, sepsis, eye infection, systemic infection, lupus, arthritis, multiple sclerosis, low bone density, osteoporosis, osteogenesis, osteopetrotic disease, Paget's disease of bone, cancer, bladder cancer, brain cancer, breast cancer, colon cancer, rectal cancer, endometrial cancer, kidney cancer, renal cell cancer, renal pelvis cancer, leukemia, lung cancer, melanoma, non-Hodgkin's lymphoma, pancreatic cancer, prostate cancer, ovarian cancer, fibrosarcoma, acute lymphoblastic leukemia (ALL), acute myeloid leukemia (AML), chronic lymphocytic leukemia (CLL), chronic myeloid leukemia (CML), multiple myeloma, polycythemia vera, essential thrombocytosis, primary or idiopathic myelofibrosis, primary or idiopathic myelosclerosis, myeloid-derived tumors, tumors that express TREM2, thyroid cancer, infections, CNS herpes, parasitic infections, Trypanosome infection, Cruzi infection, Pseudomonas aeruginosa infection, Leishmania donovani infection, group B Streptococcus infection, Campylobacter jejuni infection, Neisseria meningiditis infection, type I HIV, and Haemophilus influenza.

[0336] Antibody Preparation

[0337] Anti-TREM2 antibodies of the present disclosure can encompass polyclonal antibodies, monoclonal antibodies, humanized and chimeric antibodies, human antibodies, antibody fragments (e.g., Fab, Fab′-SH, Fv, scFv, and F(ab′)₂), bispecific and polyspecific antibodies, multivalent antibodies, library derived antibodies, antibodies having modified effector functions, fusion proteins containing an antibody portion, and any other modified configuration of the immunoglobulin molecule that includes an antigen recognition site, such as an epitope having amino acid residues of a TREM2 protein of the present disclosure, including glycosylation variants of antibodies, amino acid sequence variants of antibodies, and covalently modified antibodies. The anti-TREM2 antibodies may be human, murine, rat, or of any other origin (including chimeric or humanized antibodies).

[0338] (1) Polyclonal Antibodies

[0339] Polyclonal antibodies, such as anti-TREM2 polyclonal antibodies, are generally raised in animals by multiple subcutaneous (sc) or intraperitoneal (ip) injections of the relevant antigen and an adjuvant. It may be useful to conjugate the relevant antigen (e.g., a purified or recombinant TREM2 protein of the present disclosure) to a protein that is immunogenic in the species to be immunized, e.g., keyhole limpet hemocyanin (KLH), serum albumin, bovine thyroglobulin, or soybean trypsin inhibitor, using a bifunctional or derivatizing agent, e.g., maleimidobenzoyl sulfosuccinimide ester (conjugation through cysteine residues), N-hydroxysuccinimide (through lysine residues), glutaraldehyde, succinic anhydride, SOCl₂, or R¹N═C═NR, where R and R′ are independently lower alkyl groups. Examples of adjuvants which may be employed include Freund's complete adjuvant and MPL-TDM adjuvant (monophosphoryl Lipid A, synthetic trehalose dicorynomycolate). The immunization protocol may be selected by one skilled in the art without undue experimentation.

[0340] The animals are immunized against the desired antigen, immunogenic conjugates, or derivatives by combining, e.g., 100 μg (for rabbits) or 5 μg (for mice) of the protein or conjugate with 3 volumes of Freund's complete adjuvant and injecting the solution intradermally at multiple sites. One month later, the animals are boosted with ⅕ to 1/10 the original amount of peptide or conjugate in Freund's complete adjuvant by subcutaneous injection at multiple sites. Seven to fourteen days later, the animals are bled and the serum is assayed for antibody titer. Animals are boosted until the titer plateaus. Conjugates also can be made in recombinant-cell culture as protein fusions. Also, aggregating agents such as alum are suitable to enhance the immune response.

[0341] (2) Monoclonal Antibodies

[0342] Monoclonal antibodies, such as anti-TREM2 monoclonal antibodies, are obtained from a population of substantially homogeneous antibodies, i.e., the individual antibodies comprising the population are identical except for possible naturally occurring mutations and/or post-translational modifications (e.g., isomerizations, amidations) that may be present in minor amounts. Thus, the modifier “monoclonal” indicates the character of the antibody as not being a mixture of discrete antibodies.

[0343] For example, the anti-TREM2 monoclonal antibodies may be made using the hybridoma method first described by Kohler et al., Nature, 256:495 (1975), or may be made by recombinant DNA methods (U.S. Pat. No. 4,816,567).

[0344] In the hybridoma method, a mouse or other appropriate host animal, such as a hamster, is immunized as hereinabove described to elicit lymphocytes that produce or are capable of producing antibodies that will specifically bind to the protein used for immunization (e.g., a purified or recombinant TREM2 protein of the present disclosure). Alternatively, lymphocytes may be immunized in vitro. Lymphocytes then are fused with myeloma cells using a suitable fusing agent, such as polyethylene glycol, to form a hybridoma cell (Goding, Monoclonal Antibodies: Principles and Practice, pp. 59-103 (Academic Press, 1986)).

[0345] The immunizing agent will typically include the antigenic protein (e.g., a purified or recombinant TREM2 protein of the present disclosure) or a fusion variant thereof. Generally peripheral blood lymphocytes (“PBLs”) are used if cells of human origin are desired, while spleen or lymph node cells are used if non-human mammalian sources are desired. The lymphoctyes are then fused with an immortalized cell line using a suitable fusing agent, such as polyethylene glycol, to form a hybridoma cell. Goding, Monoclonal Antibodies: Principles and Practice, Academic Press (1986), pp. 59-103.

[0346] Immortalized cell lines are usually transformed mammalian cells, particularly myeloma cells of rodent, bovine or human origin. Usually, rat or mouse myeloma cell lines are employed. The hybridoma cells thus prepared are seeded and grown in a suitable culture medium that preferably contains one or more substances that inhibit the growth or survival of the unfused, parental myeloma cells. For example, if the parental myeloma cells lack the enzyme hypoxanthine guanine phosphoribosyl transferase (HGPRT or HPRT), the culture medium for the hybridomas typically will include hypoxanthine, aminopterin, and thymidine (HAT medium), which are substances that prevent the growth of HGPRT-deficient-cells.

[0347] Preferred immortalized myeloma cells are those that fuse efficiently, support stable high-level production of antibody by the selected antibody-producing cells, and are sensitive to a medium such as HAT medium. Among these, preferred are murine myeloma lines, such as those derived from MOPC-21 and MPC-11 mouse tumors (available from the Salk Institute Cell Distribution Center, San Diego, Calif. USA), as well as SP-2 cells and derivatives thereof (e.g., X63-Ag8-653) (available from the American Type Culture Collection, Manassas, Va. USA). Human myeloma and mouse-human heteromyeloma cell lines have also been described for the production of human monoclonal antibodies (Kozbor, J. Immunol., 133:3001 (1984); Brodeur et al., Monoclonal Antibody Production Techniques and Applications, pp. 51-63 (Marcel Dekker, Inc., New York, 1987)).

[0348] Culture medium in which hybridoma cells are growing is assayed for production of monoclonal antibodies directed against the antigen (e.g., a TREM2 protein of the present disclosure). Preferably, the binding specificity of monoclonal antibodies produced by hybridoma cells is determined by immunoprecipitation or by an in vitro binding assay, such as radioimmunoassay (RIA) or enzyme-linked immunosorbent assay (ELISA).

[0349] The culture medium in which the hybridoma cells are cultured can be assayed for the presence of monoclonal antibodies directed against the desired antigen (e.g., a TREM2 protein of the present disclosure). Preferably, the binding affinity and specificity of the monoclonal antibody can be determined by immunoprecipitation or by an in vitro binding assay, such as radioimmunoassay (RIA) or enzyme-linked assay (ELISA). Such techniques and assays are known in the in art. For example, binding affinity may be determined by the Scatchard analysis of Munson et al., Anal. Biochem., 107:220 (1980).

[0350] After hybridoma cells are identified that produce antibodies of the desired specificity, affinity, and/or activity, the clones may be subcloned by limiting dilution procedures and grown by standard methods (Goding, supra). Suitable culture media for this purpose include, for example, D-MEM or RPMI-1640 medium. In addition, the hybridoma cells may be grown in vivo as tumors in a mammal.

[0351] The monoclonal antibodies secreted by the subclones are suitably separated from the culture medium, ascites fluid, or serum by conventional immunoglobulin purification procedures such as, for example, protein A-Sepharose chromatography, hydroxylapatite chromatography, gel electrophoresis, dialysis, affinity chromatography, and other methods as described above.

[0352] Anti-TREM2 monoclonal antibodies may also be made by recombinant DNA methods, such as those disclosed in U.S. Pat. No. 4,816,567, and as described above. DNA encoding the monoclonal antibodies is readily isolated and sequenced using conventional procedures (e.g., by using oligonucleotide probes that specifically bind to genes encoding the heavy and light chains of murine antibodies). The hybridoma cells serve as a preferred source of such DNA. Once isolated, the DNA may be placed into expression vectors, which are then transfected into host-cells such as E. coli cells, simian COS cells, Chinese hamster ovary (CHO) cells, or myeloma cells that do not otherwise produce immunoglobulin protein, in order to synthesize monoclonal antibodies in such recombinant host-cells. Review articles on recombinant expression in bacteria of DNA encoding the antibody include Skerra et al., Curr. Opin. Immunol., 5:256-262 (1993) and Plückthun, Immunol. Rev. 130:151-188 (1992).

[0353] In certain embodiments, anti-TREM2 antibodies can be isolated from antibody phage libraries generated using the techniques described in McCafferty et al., Nature, 348:552-554 (1990). Clackson et al., Nature, 352:624-628 (1991) and Marks et al., J. Mol. Biol., 222:581-597 (1991) described the isolation of murine and human antibodies, respectively, from phage libraries. Subsequent publications describe the production of high affinity (nanomolar (“nM”) range) human antibodies by chain shuffling (Marks et al., Bio/Technology, 10:779-783 (1992)), as well as combinatorial infection and in vivo recombination as a strategy for constructing very large phage libraries (Waterhouse et al., Nucl. Acids Res., 21:2265-2266 (1993)). Thus, these techniques are viable alternatives to traditional monoclonal antibody hybridoma techniques for isolation of monoclonal antibodies of desired specificity (e.g., those that bind a TREM2 protein of the present disclosure).

[0354] The DNA encoding antibodies or fragments thereof may also be modified, for example, by substituting the coding sequence for human heavy- and light-chain constant domains in place of the homologous murine sequences (U.S. Pat. No. 4,816,567; Morrison, et al., Proc. Natl Acad. Sci. USA, 81:6851 (1984)), or by covalently joining to the immunoglobulin coding sequence all or part of the coding sequence for a non-immunoglobulin polypeptide. Typically such non-immunoglobulin polypeptides are substituted for the constant domains of an antibody, or they are substituted for the variable domains of one antigen-combining site of an antibody to create a chimeric bivalent antibody comprising one antigen-combining site having specificity for an antigen and another antigen-combining site having specificity for a different antigen.

[0355] The monoclonal antibodies described herein (e.g., anti-TREM2 antibodies of the present disclosure or fragments thereof) may by monovalent, the preparation of which is well known in the art. For example, one method involves recombinant expression of immunoglobulin light chain and a modified heavy chain. The heavy chain is truncated generally at any point in the Fc region so as to prevent heavy chain crosslinking. Alternatively, the relevant cysteine residues may be substituted with another amino acid residue or are deleted so as to prevent crosslinking. In vitro methods are also suitable for preparing monovalent antibodies. Digestion of antibodies to produce fragments thereof, particularly Fab fragments, can be accomplished using routine techniques known in the art.

[0356] Chimeric or hybrid anti-TREM2 antibodies also may be prepared in vitro using known methods in synthetic protein chemistry, including those involving crosslinking agents. For example, immunotoxins may be constructed using a disulfide-exchange reaction or by forming a thioether bond. Examples of suitable reagents for this purpose include iminothiolate and methyl-4-mercaptobutyrimidate.

[0357] (3) Humanized Antibodies

[0358] Anti-TREM2 antibodies of the present disclosure or antibody fragments thereof may further include humanized or human antibodies. Humanized forms of non-human (e.g., murine) antibodies are chimeric immunoglobulins, immunoglobulin chains or fragments thereof (such as Fab, Fab′-SH, Fv, scFv, F(ab′)₂ or other antigen-binding subsequences of antibodies) which contain minimal sequence derived from non-human immunoglobulin. Humanized antibodies include human immunoglobulins (recipient antibody) in which residues from a complementarity determining region (CDR) of the recipient are replaced by residues from a CDR of a non-human species (donor antibody) such as mouse, rat or rabbit having the desired specificity, affinity and capacity. In some instances, Fv framework residues of the human immunoglobulin are replaced by corresponding non-human residues. Humanized antibodies may also comprise residues which are found neither in the recipient antibody nor in the imported CDR or framework sequences. In general, the humanized antibody will comprise substantially all of at least one, and typically two, variable domains, in which all or substantially all of the CDR regions correspond to those of a non-human immunoglobulin and all or substantially all of the FR regions are those of a human immunoglobulin consensus sequence. The humanized antibody optimally will also comprise at least a portion of an immunoglobulin constant region (Fc), typically that of a human immunoglobulin. Jones et al., Nature 321: 522-525 (1986); Riechmann et al., Nature 332: 323-329 (1988) and Presta, Curr. Opin. Struct. Biol. 2: 593-596 (1992).

[0359] Methods for humanizing non-human anti-TREM2 antibodies are well known in the art. Generally, a humanized antibody has one or more amino acid residues introduced into it from a source which is non-human. These non-human amino acid residues are often referred to as “import” residues, which are typically taken from an “import” variable domain. Humanization can be essentially performed following the method of Winter and co-workers, Jones et al., Nature 321:522-525 (1986); Riechmann et al., Nature 332:323-327 (1988); Verhoeyen et al., Science 239:1534-1536 (1988), or through substituting rodent CDRs or CDR sequences for the corresponding sequences of a human antibody. Accordingly, such “humanized” antibodies are chimeric antibodies (U.S. Pat. No. 4,816,567), wherein substantially less than an intact human variable domain has been substituted by the corresponding sequence from a non-human species. hi practice, humanized antibodies are typically human antibodies in which some CDR residues and possibly some FR residues are substituted by residues from analogous sites in rodent antibodies.

[0360] The choice of human variable domains, both light and heavy, to be used in making the humanized antibodies is very important to reduce antigenicity. According to the so-called “best-fit” method, the sequence of the variable domain of a rodent antibody is screened against the entire library of known human variable-domain sequences. The human sequence which is closest to that of the rodent is then accepted as the human framework (FR) for the humanized antibody. Sims et al., J. Immunol., 151:2296 (1993); Chothia et al., J. Mol. Biol., 196:901 (1987). Another method uses a particular framework derived from the consensus sequence of all human antibodies of a particular subgroup of light or heavy chains. The same framework may be used for several different humanized antibodies. Carter et al., Proc. Nat'l Acad. Sci. USA 89:4285 (1992); Presta et al., J. Immunol. 151:2623 (1993).

[0361] Furthermore, it is important that antibodies be humanized with retention of high affinity for the antigen and other favorable biological properties. To achieve this goal, according to a preferred method, humanized antibodies are prepared by a process of analyzing the parental sequences and various conceptual humanized products using three-dimensional models of the parental and humanized sequences. Three-dimensional immunoglobulin models are commonly available and are familiar to those skilled in the art. Computer programs are available which illustrate and display probable three-dimensional conformational structures of selected candidate immunoglobulin sequences. Inspection of these displays permits analysis of the likely role of the residues in the functioning of the candidate immunoglobulin sequence, i.e., the analysis of residues that influence the ability of the candidate immunoglobulin to bind its antigen. In this way, FR residues can be selected and combined from the recipient and import sequences so that the desired antibody characteristic, such as increased affinity for the target antigen or antigens (e.g., TREM2 proteins of the present disclosure), is achieved. In general, the CDR residues are directly and most substantially involved in influencing antigen binding.

[0362] Various forms of the humanized anti-TREM2 antibody are contemplated. For example, the humanized anti-TREM2 antibody may be an antibody fragment, such as an Fab, which is optionally conjugated with one or more TREM2 ligand, such as HSP60. Alternatively, the humanized anti-TREM2 antibody may be an intact antibody, such as an intact IgG1 antibody.

[0363] (4) Human Antibodies

[0364] Alternatively, human anti-TREM2 antibodies can be generated. For example, it is now possible to produce transgenic animals (e.g., mice) that are capable, upon immunization, of producing a full repertoire of human antibodies in the absence of endogenous immunoglobulin production. The homozygous deletion of the antibody heavy-chain joining region (J_{H}) gene in chimeric and germ-line mutant mice results in complete inhibition of endogenous antibody production. Transfer of the human germ-line immunoglobulin gene array in such germ-line mutant mice will result in the production of human antibodies upon antigen challenge. See, e.g., Jakobovits et al., Proc. Nat'l Acad. Sci. USA, 90:2551 (1993); Jakobovits et al., Nature, 362:255-258 (1993); Bruggermann et al., Year in Immunol., 7:33 (1993); U.S. Pat. No. 5,591,669 and WO 97/17852.

[0365] Alternatively, phage display technology can be used to produce human anti-TREM2 antibodies and antibody fragments in vitro, from immunoglobulin variable (V) domain gene repertoires from unimmunized donors. McCafferty et al., Nature 348:552-553 (1990); Hoogenboom and Winter, J. Mol. Biol. 227: 381 (1991). According to this technique, antibody V domain genes are cloned in-frame into either a major or minor coat protein gene of a filamentous bacteriophage, such as M13 or fd, and displayed as functional antibody fragments on the surface of the phage particle. Because the filamentous particle contains a single-stranded DNA copy of the phage genome, selections based on the functional properties of the antibody also result in selection of the gene encoding the antibody exhibiting those properties. Thus, the phage mimics some of the properties of the B-cell. Phage display can be performed in a variety of formats, reviewed in, e.g., Johnson, Kevin S. and Chiswell, David J., Curr. Opin Struct. Biol. 3:564-571 (1993). Several sources of V-gene segments can be used for phage display. Clackson et al., Nature 352:624-628 (1991) isolated a diverse array of anti-oxazolone antibodies from a small random combinatorial library of V genes derived from the spleens of immunized mice. A repertoire of V genes from unimmunized human donors can be constructed and antibodies to a diverse array of antigens (including self-antigens) can be isolated essentially following the techniques described by Marks et al., J. Mol. Biol. 222:581-597 (1991), or Griffith et al., EMBO J. 12:725-734 (1993). See also U.S. Pat. Nos. 5,565,332 and 5,573,905. Additionally, yeast display technology can be used to produce human anti-TREM2 antibodies and antibody fragments in vitro (e.g., WO 2009/036379; WO 2010/105256; WO 2012/009568; US 2009/0181855; US 2010/0056386; and Feldhaus and Siegel (2004) J. Immunological Methods 290:69-80). In other embodiments, ribosome display technology can be used to produce human anti-TREM2 antibodies and antibody fragments in vitro (e.g., Roberts and Szostak (1997) Proc Natl Acad Sci 94:12297-12302; Schaffitzel et al. (1999) J. Immunolical Methods 231:119-135; Lipovsek and Plückthun (2004) J. Immunological Methods 290:51-67).

[0366] The techniques of Cole et al., and Boerner et al., are also available for the preparation of human anti-TREM2 monoclonal antibodies (Cole et al., Monoclonal Antibodies and Cancer Therapy, Alan R. Liss, p. 77 (1985) and Boerner et al., J. Immunol. 147(1): 86-95 (1991). Similarly, human anti-TREM2 antibodies can be made by introducing human immunoglobulin loci into transgenic animals, e.g., mice in which the endogenous immunoglobulin genes have been partially or completely inactivated. Upon challenge, human antibody production is observed, which closely resembles that seen in humans in all respects, including gene rearrangement, assembly and antibody repertoire. This approach is described, for example, in U.S. Pat. Nos. 5,545,807; 5,545,806, 5,569,825, 5,625,126, 5,633,425, 5,661,016 and in the following scientific publications: Marks et al., Bio/Technology 10: 779-783 (1992); Lonberg et al., Nature 368: 856-859 (1994); Morrison, Nature 368: 812-13 (1994), Fishwild et al., Nature Biotechnology 14: 845-51 (1996), Neuberger, Nature Biotechnology 14: 826 (1996) and Lonberg and Huszar, Intern. Rev. Immunol. 13: 65-93 (1995).

[0367] Finally, human anti-TREM2 antibodies may also be generated in vitro by activated B-cells (see U.S. Pat. Nos. 5,567,610 and 5,229,275).

[0368] (5) Antibody Fragments

[0369] In certain embodiments there are advantages to using anti-TREM2 antibody fragments, rather than whole anti-TREM2 antibodies. In some embodiments, smaller fragment sizes allow for rapid clearance and better brain penetration.

[0370] Various techniques have been developed for the production of antibody fragments. Traditionally, these fragments were derived via proteolytic digestion of intact antibodies (see, e.g., Morimoto et al., J. Biochem. Biophys. Method. 24:107-117 (1992); and Brennan et al., Science 229:81 (1985)). However, these fragments can now be produced directly by recombinant host-cells, for example, using nucleic acids encoding anti-TREM2 antibodies of the present disclosure. Fab, Fv and scFv antibody fragments can all be expressed in and secreted from E. coli, thus allowing the straightforward production of large amounts of these fragments. Anti-TREM2 antibody fragments can also be isolated from the antibody phage libraries as discussed above. Alternatively, Fab′-SH fragments can be directly recovered from E. coli and chemically coupled to form F(ab′)₂ fragments (Carter et al., Bio/Technology 10:163-167 (1992)). According to another approach, F(ab′)₂ fragments can be isolated directly from recombinant host-cell culture. Production of Fab and F(ab′)₂ antibody fragments with increased in vivo half-lives are described in U.S. Pat. No. 5,869,046. In other embodiments, the antibody of choice is a single chain Fv fragment (scFv). See WO 93/16185; U.S. Pat. Nos. 5,571,894 and 5,587,458. The anti-TREM2 antibody fragment may also be a “linear antibody,” e.g., as described in U.S. Pat. No. 5,641,870. Such linear antibody fragments may be monospecific or bispecific.

[0371] (6) Bispecific and Polyspecific Antibodies

[0372] Bispecific antibodies (BsAbs) are antibodies that have binding specificities for at least two different epitopes, including those on the same or another protein (e.g., one or more TREM2 proteins of the present disclosure). Alternatively, one part of a BsAb can be armed to bind to the target TREM2 antigen, and another can be combined with an arm that binds to a second protein. Such antibodies can be derived from full-length antibodies or antibody fragments (e.g., F(ab′)₂ bispecific antibodies).

[0373] Methods for making bispecific antibodies are known in the art. Traditional production of full-length bispecific antibodies is based on the coexpression of two immunoglobulin heavy-chain/light chain pairs, where the two chains have different specificities. Millstein et al., Nature, 305:537-539 (1983). Because of the random assortment of immunoglobulin heavy and light chains, these hybridomas (quadromas) produce a potential mixture of 10 different antibody molecules, of which only one has the correct bispecific structure. Purification of the correct molecule, which is usually done by affinity chromatography steps, is rather cumbersome, and the product yields are low. Similar procedures are disclosed in WO 93/08829 and in Traunecker et al., EMBO J., 10:3655-3659 (1991).

[0374] According to a different approach, antibody variable domains with the desired binding specificities (antibody-antigen combining sites) are fused to immunoglobulin constant domain sequences. The fusion preferably is with an immunoglobulin heavy chain constant domain, comprising at least part of the hinge, C_{H}2, and C_{H}3 regions. It is preferred to have the first heavy-chain constant region (C_{H}1) containing the site necessary for light chain binding, present in at least one of the fusions. DNAs encoding the immunoglobulin heavy chain fusions and, if desired, the immunoglobulin light chain, are inserted into separate expression vectors, and are co-transfected into a suitable host organism. This provides for great flexibility in adjusting the mutual proportions of the three polypeptide fragments in embodiments when unequal ratios of the three polypeptide chains used in the construction provide the optimum yields. It is, however, possible to insert the coding sequences for two or all three polypeptide chains in one expression vector when the expression of at least two polypeptide chains in equal ratios results in high yields or when the ratios are of no particular significance.

[0375] In a preferred embodiment of this approach, the bispecific antibodies are composed of a hybrid immunoglobulin heavy chain with a first binding specificity in one arm, and a hybrid immunoglobulin heavy chain-light chain pair (providing a second binding specificity) in the other arm. It was found that this asymmetric structure facilitates the separation of the desired bispecific compound from unwanted immunoglobulin chain combinations, as the presence of an immunoglobulin light chain in only half of the bispecific molecules provides for an easy way of separation. This approach is disclosed in WO 94/04690. For further details of generating bispecific antibodies, see, for example, Suresh et al., Methods in Enzymology 121: 210 (1986); and Garber, Nature Reviews Drug Discovery 13, 799-801 (2014).

[0376] According to another approach described in WO 96/27011 or U.S. Pat. No. 5,731,168, the interface between a pair of antibody molecules can be engineered to maximize the percentage of heterodimers which are recovered from recombinant-cell culture. The preferred interface comprises at least a part of the C_{H}3 region of an antibody constant domain. In this method, one or more small amino acid side chains from the interface of the first antibody molecule are replaced with larger side chains (e.g., tyrosine or tryptophan). Compensatory “cavities” of identical or similar size to the large side chains(s) are created on the interface of the second antibody molecule by replacing large amino acid side chains with smaller ones (e.g., alanine or threonine). This provides a mechanism for increasing the yield of the heterodimer over other unwanted end-products such as homodimers.

[0377] Techniques for generating bispecific antibodies from antibody fragments have been described in the literature. For example, bispecific antibodies can be prepared using chemical linkage. Brennan et al., Science 229:81 (1985) describe a procedure wherein intact antibodies are proteolytically cleaved to generate F(ab′)₂ fragments. These fragments are reduced in the presence of the dithiol complexing agent sodium arsenite to stabilize vicinal dithiols and prevent intermolecular disulfide formation. The Fab′ fragments generated are then converted to thionitrobenzoate (TNB) derivatives. One of the Fab′-TNB derivatives is then reconverted to the Fab′-TNB derivative to form the bispecific antibody. The bispecific antibodies produced can be used as agents for the selective immobilization of enzymes.

[0378] Fab′ fragments may be directly recovered from E. coli and chemically coupled to form bispecific antibodies. Shalaby et al., J. Exp. Med. 175: 217-225 (1992) describes the production of fully humanized bispecific antibody F(ab′)₂ molecules. Each Fab′ fragment was separately secreted from E. coli and subjected to directed chemical coupling in vitro to form the bispecific antibody. The bispecific antibody thus formed was able to bind to cells overexpressing the ErbB2 receptor and normal human T-cells, as well as trigger the lytic activity of human cytotoxic lymphocytes against human breast tumor targets.

[0379] Various techniques for making and isolating bivalent antibody fragments directly from recombinant-cell culture have also been described. For example, bivalent heterodimers have been produced using leucine zippers. Kostelny et al., J. Immunol., 148(5):1547-1553 (1992). The leucine zipper peptides from the Fos and Jun proteins were linked to the Fab′ portions of two different antibodies by gene fusion. The antibody homodimers were reduced at the hinge region to form monomers and then re-oxidized to form the antibody heterodimers. The “diabody” technology described by Hollinger et al., Proc. Nat'l Acad. Sci. USA, 90: 6444-6448 (1993) has provided an alternative mechanism for making bispecific/bivalent antibody fragments. The fragments comprise a heavy-chain variable domain (V_{H}) connected to a light-chain variable domain (V_{L}) by a linker which is too short to allow pairing between the two domains on the same chain. Accordingly, the V_{H} and V_{L} domains of one fragment are forced to pair with the complementary V_{L} and V_{H} domains of another fragment, thereby forming two antigen-binding sites. Another strategy for making bispecific/bivalent antibody fragments by the use of single-chain Fv (sFv) dimers has also been reported. See Gruber et al., J. Immunol., 152:5368 (1994).

[0380] Another method to generate bispecific antibodies is designated controlled Fab-arm exchange (cFAE), which is an easy-to-use method to generate bispecific IgG1 (bslgGl). The protocol involves the following: (i) separate expression of two parental IgGls containing single matching point mutations in the CH3 domain; (ii) mixing of parental IgGls under permissive redox conditions in vitro to enable recombination of half-molecules; (iii) removal of the reductant to allow reoxidation of interchain disulfide bonds; and (iv) analysis of exchange efficiency and final product using chromatography-based or mass spectrometry (MS)-based methods. The protocol generates bsAbs with regular IgG architecture, characteristics and quality attributes both at bench scale (micrograms to milligrams) and at a mini-bioreactor scale (milligrams to grams) that is designed to model large-scale manufacturing (kilograms). Starting from good-quality purified proteins, exchange efficiencies of >95% can be obtained within 2-3 days (including quality control). See Labrijn et al., Natur Protocols 9, 2450-2463 (2014); and Garber, Nature Reviews Drug Discovery 13, 799-801 (2014).

[0381] Antibodies with more than two valencies are also contemplated. For example, trispecific antibodies can be prepared. Tutt et al., J. Immunol. 147:60 (1991).

[0382] Exemplary bispecific antibodies may bind to two different epitopes on a given molecule (e.g., a TREM2 protein of the present disclosure). In some embodiments a bispecific antibody binds to a first antigen, such as a TREM2 or DAP12 protein of the present disclosure, and a second antigen facilitating transport across the blood-brain barrier. Numerous antigens are known in the art that facilitate transport across the blood-brain barrier (see, e.g., Gabathuler R., Approaches to transport therapeutic drugs across the blood-brain barrier to treat brain diseases, Neurobiol. Dis. 37 (2010) 48-57). Such second antigens include, without limitation, transferrin receptor (TR), insulin receptor (HIR), Insulin-like growth factor receptor (IGFR), low-density lipoprotein receptor related proteins 1 and 2 (LPR-1 and 2), diphtheria toxin receptor, including CRM197 (a non-toxic mutant of diphtheria toxin), llama single domain antibodies such as TMEM 30(A) (Flippase), protein transduction domains such as TAT, Syn-B, or penetratin, poly-arginine or generally positively charged peptides, Angiopep peptides such as ANG1005 (see, e.g., Gabathuler, 2010), and other cell surface proteins that are enriched on blood-brain barrier endothelial cells (see, e.g., Daneman et al., PLoS One. 2010 Oct. 29; 5(10):e13741). In some embodiments, second antigens for an anti-TREM2 antibody may include, without limitation, a DAP12 antigen of the present disclosure. In other embodiments, second antigens for an anti-DAP12 antibody may include, without limitation, a TREM2 antigen of the present disclosure. In other embodiments, bispecific antibodies that bind to both TREM2 and DAP12 may facilitate and enhance one or more TREM2 activities. In other embodiments, second antigens for an anti-TREM2 antibody may include, without limitation, A beta peptide, antigen or an alpha synuclein protein antigen or, Tau protein antigen or, TDP-43 protein antigen or, prion protein antigen or, huntingtin protein antigen, or RAN, translation Products antigen, including the DiPeptide Repeats, (DPRs peptides) composed of glycine-alanine (GA), glycine-proline (GP), glycine-arginine (GR), proline-alanine (PA), or proline-arginine (PR).

[0383] (7) Multivalent Antibodies

[0384] A multivalent antibody may be internalized (and/or catabolized) faster than a bivalent antibody by a cell expressing an antigen to which the antibodies bind. The anti-TREM2 antibodies of the present disclosure or antibody fragments thereof can be multivalent antibodies (which are other than of the IgM class) with three or more antigen binding sites (e.g., tetravalent antibodies), which can be readily produced by recombinant expression of nucleic acid encoding the polypeptide chains of the antibody. The multivalent antibody can comprise a dimerization domain and three or more antigen binding sites. The preferred dimerization domain comprises an Fc region or a hinge region. In this scenario, the antibody will comprise an Fc region and three or more antigen binding sites amino-terminal to the Fc region. The preferred multivalent antibody herein contains three to about eight, but preferably four, antigen binding sites. The multivalent antibody contains at least one polypeptide chain (and preferably two polypeptide chains), wherein the polypeptide chain or chains comprise two or more variable domains. For instance, the polypeptide chain or chains may comprise VD1-(X1)n-VD2-(X2)n-Fc, wherein VD1 is a first variable domain, VD2 is a second variable domain, Fc is one polypeptide chain of an Fc region, X1 and X2 represent an amino acid or polypeptide, and n is 0 or 1. Similarly, the polypeptide chain or chains may comprise V_{H}-C_{H}1-flexible linker-V_{H}-C_{H}1-Fc region chain; or V_{H}—C_{H}1-V_{H}-C_{H}1-Fc region chain. The multivalent antibody herein preferably further comprises at least two (and preferably four) light chain variable domain polypeptides. The multivalent antibody herein may, for instance, comprise from about two to about eight light chain variable domain polypeptides. The light chain variable domain polypeptides contemplated here comprise a light chain variable domain and, optionally, further comprise a CL domain. The Multivalent antibodies may recognize the TREM2 antigen as well as without limitation additional antigens A beta peptide, antigen or an alpha synuclein protein antigen or, Tau protein antigen or, TDP-43 protein antigen or, prion protein antigen or, huntingtin protein antigen, or RAN, translation Products antigen, including the DiPeptide Repeats, (DPRs peptides) composed of glycine-alanine (GA), glycine-proline (GP), glycine-arginine (GR), proline-alanine (PA), or proline-arginine (PR), Insulin receptor, insulin like growth factor receptor. Transferrin receptor or any other antigen that facilitate antibody transfer across the blood brain barrier.

[0385] (8) Effector Function Engineering

[0386] It may also be desirable to modify an anti-TREM2 antibody of the present disclosure to modify effector function and/or to increase serum half-life of the antibody. For example, the Fc receptor binding site on the constant region may be modified or mutated to remove or reduce binding affinity to certain Fc receptors, such as FcγRI, FcγRII, and/or FcγRIII to reduce Antibody-dependent cell-mediated cytotoxicity. In some embodiments, the effector function is impaired by removing N-glycosylation of the Fc region (e.g., in the CH 2 domain of IgG) of the antibody. In some embodiments, the effector function is impaired by modifying regions such as 233-236, 297, and/or 327-331 of human IgG as described in PCT WO 99/58572 and Armour et al., Molecular Immunology 40: 585-593 (2003); Reddy et al., J. Immunology 164:1925-1933 (2000). In other embodiments, it may also be desirable to modify an anti-TREM2 antibody of the present disclosure to modify effector function to increase finding selectivity toward the ITIM-containing FcgRIIb (CD32b) to increase clustering of TREM2 antibodies on adjacent cells without activating humoral responses including Antibody-dependent cell-mediated cytotoxicity and antibody-dependent cellular phagocytosis.

[0387] To increase the serum half-life of the antibody, one may incorporate a salvage receptor binding epitope into the antibody (especially an antibody fragment) as described in U.S. Pat. No. 5,739,277, for example. As used herein, the term “salvage receptor binding epitope” refers to an epitope of the Fc region of an IgG molecule (e.g., IgG₁, IgG₂, IgG₃, or IgG₄) that is responsible for increasing the in vivo serum half-life of the IgG molecule.

[0388] (9) Other Amino Acid Sequence Modifications

[0389] Amino acid sequence modifications of anti-TREM2 antibodies of the present disclosure, or antibody fragments thereof, are also contemplated. For example, it may be desirable to improve the binding affinity and/or other biological properties of the antibodies or antibody fragments. Amino acid sequence variants of the antibodies or antibody fragments are prepared by introducing appropriate nucleotide changes into the nucleic acid encoding the antibodies or antibody fragments, or by peptide synthesis. Such modifications include, for example, deletions from, and/or insertions into and/or substitutions of, residues within the amino acid sequences of the antibody. Any combination of deletion, insertion, and substitution is made to arrive at the final construct, provided that the final construct possesses the desired characteristics (i.e., the ability to bind or physically interact with a TREM2 protein of the present disclosure). The amino acid changes also may alter post-translational processes of the antibody, such as changing the number or position of glycosylation sites.

[0390] A useful method for identification of certain residues or regions of the anti-TREM2 antibody that are preferred locations for mutagenesis is called “alanine scanning mutagenesis” as described by Cunningham and Wells in Science, 244:1081-1085 (1989). Here, a residue or group of target residues are identified (e.g., charged residues such as arg, asp, his, lys, and glu) and replaced by a neutral or negatively charged amino acid (most preferably alanine or polyalanine) to affect the interaction of the amino acids with the target antigen. Those amino acid locations demonstrating functional sensitivity to the substitutions then are refined by introducing further or other variants at, or for, the sites of substitution. Thus, while the site for introducing an amino acid sequence variation is predetermined, the nature of the mutation per se need not be predetermined. For example, to analyze the performance of a mutation at a given site, alanine scanning or random mutagenesis is conducted at the target codon or region and the expressed antibody variants are screened for the desired activity.

[0391] Amino acid sequence insertions include amino-(“N”) and/or carboxy-(“C”) terminal fusions ranging in length from one residue to polypeptides containing a hundred or more residues, as well as intrasequence insertions of single or multiple amino acid residues. Examples of terminal insertions include an antibody with an N-terminal methionyl residue or the antibody fused to a cytotoxic polypeptide. Other insertional variants of the antibody molecule include the fusion to the N- or C-terminus of the antibody to an enzyme or a polypeptide which increases the serum half-life of the antibody.

[0392] Another type of variant is an amino acid substitution variant. These variants have at least one amino acid residue in the antibody molecule replaced by a different residue. The sites of greatest interest for substitutional mutagenesis include the hypervariable regions, but FR alterations are also contemplated. Conservative substitutions are shown in the Table C below under the heading of “preferred substitutions”. If such substitutions result in a change in biological activity, then more substantial changes, denominated “exemplary substitutions” in Table C, or as further described below in reference to amino acid classes, may be introduced and the products screened.

TABLE C
Amino Acid Substitutions

| Original | | Preferred |
|---|---|---|
| Residue | Exemplary Substitutions | Substitutions |
| Ala (A) | val; leu; ile | val |
| Arg (R) | lys; gln; asn | lys |
| Asn (N) | gln; his; asp, lys; arg | gln |
| Asp (D) | glu; asn | glu |
| Cys (C) | ser; ala | ser |
| Gln (Q) | asn; glu | asn |
| Glu (E) | asp; gln | asp |
| Gly (G) | ala | ala |
| His (H) | asn; gln; lys; arg | arg |
| Ile (I) | leu; val; met; ala; phe; norleucine | leu |
| Leu (L) | norleucine; ile; val; met; ala; phe | ile |
| Lys (K) | arg; gln; asn | arg |
| Met (M) | leu; phe; ile | leu |
| Phe (F) | leu; val; ile; ala; tyr | tyr |
| Pro (P) | ala | ala |
| Ser (S) | thr | thr |
| Thr (T) | Ser | ser |
| Trp (W) | tyr; phe | tyr |
| Tyr (Y) | trp; phe; thr; ser | phe |
| Val (V) | ile; leu; met; phe; ala; norleucine | leu |

[0393] Substantial modifications in the biological properties of the antibody are accomplished by selecting substitutions that differ significantly in their effect on maintaining (a) the structure of the polypeptide backbone in the area of the substitution, for example, as a sheet or helical conformation, (b) the charge or hydrophobicity of the molecule at the target site, or (c) the bulk of the side chain. Naturally occurring residues are divided into groups based on common side-chain properties:

[0394] (1) hydrophobic: norleucine, met, ala, val, leu, ile;

[0395] (2) neutral hydrophilic: cys, ser, thr;

[0396] (3) acidic: asp, glu;

[0397] (4) basic: asn, gln, his, lys, arg;

[0398] (5) residues that influence chain orientation: gly, pro; and

[0399] (6) aromatic: trp, tyr, phe.

[0400] Non-conservative substitutions entail exchanging a member of one of these classes for another class.

[0401] Any cysteine residue not involved in maintaining the proper conformation of the antibody also may be substituted, generally with serine, to improve the oxidative stability of the molecule and prevent aberrant crosslinking Conversely, cysteine bond(s) may be added to the antibody to improve its stability (particularly where the antibody is an antibody fragment, such as an Fv fragment).

[0402] A particularly preferred type of substitutional variant involves substituting one or more hypervariable region residues of a parent antibody (e.g. a humanized or human anti-TREM2 antibody). Generally, the resulting variant(s) selected for further development will have improved biological properties relative to the parent antibody from which they are generated. A convenient way for generating such substitutional variants involves affinity maturation using phage display. Briefly, several hypervariable region sites (e.g., 6-7 sites) are mutated to generate all possible amino substitutions at each site. The antibody variants thus generated are displayed in a monovalent fashion from filamentous phage particles as fusions to the gene III product of M13 packaged within each particle. The phage-displayed variants are then screened for their biological activity (e.g., binding affinity) as herein disclosed. In order to identify candidate hypervariable region sites for modification, alanine scanning mutagenesis can be performed to identify hypervariable region residues contributing significantly to antigen binding. Alternatively, or additionally, it may be beneficial to analyze a crystal structure of the antigen-antibody complex to identify contact points between the antibody and the antigen (e.g., a TREM2 protein of the present disclosure). Such contact residues and neighboring residues are candidates for substitution according to the techniques elaborated herein. Once such variants are generated, the panel of variants is subjected to screening as described herein and antibodies with superior properties in one or more relevant assays may be selected for further development.

[0403] Another type of amino acid variant of the antibody alters the original glycosylation pattern of the antibody. By altering is meant deleting one or more carbohydrate moieties found in the antibody, and/or adding one or more glycosylation sites that are not present in the antibody.

[0404] Glycosylation of antibodies is typically either N-linked or O-linked. N-linked refers to the attachment of the carbohydrate moiety to the side chain of an asparagine residue. The tripeptide sequences asparagine-X-serine and asparagine-X-threonine, where X is any amino acid except proline, are the recognition sequences for enzymatic attachment of the carbohydrate moiety to the asparagine side chain. Thus, the presence of either of these tripeptide sequences in a polypeptide creates a potential glycosylation site. O-linked glycosylation refers to the attachment of one of the sugars N-aceylgalactosamine, galactose, or xylose to a hydroxyamino acid, most commonly serine or threonine, although 5-hydroxyproline or 5-hydroxylysine may also be used.

[0405] Addition of glycosylation sites to the antibody is conveniently accomplished by altering the amino acid sequence such that it contains one or more of the above-described tripeptide sequences (for N-linked glycosylation sites). The alteration may also be made by the addition of, or substitution by, one or more serine or threonine residues to the sequence of the original antibody (for O-linked glycosylation sites).

[0406] Nucleic acid molecules encoding amino acid sequence variants of the anti-IgE antibody are prepared by a variety of methods known in the art. These methods include, but are not limited to, isolation from a natural source (in the case of naturally occurring amino acid sequence variants) or preparation by oligonucleotide-mediated (or site-directed) mutagenesis, PCR mutagenesis, and cassette mutagenesis of an earlier prepared variant or a non-variant version of the antibodies (e.g., anti-TREM2 antibodies of the present disclosure) or antibody fragments.

[0407] (10) Other Antibody Modifications

[0408] Anti-TREM2 antibodies of the present disclosure, or antibody fragments thereof, can be further modified to contain additional non-proteinaceous moieties that are known in the art and readily available, or to contain different types of drug conjugates that are known in the art and readily available. Preferably, the moieties suitable for derivatization of the antibody are water-soluble polymers. Non-limiting examples of water-soluble polymers include, but are not limited to, polyethylene glycol (PEG), copolymers of ethylene glycol/propylene glycol, carboxymethylcellulose, dextran, polyvinyl alcohol, polyvinyl pyrrolidone, poly-1, 3-dioxolane, poly-1,3,6-trioxane, ethylene/maleic anhydride copolymer, polyaminoacids (either homopolymers or random copolymers), and dextran or poly(n-vinyl pyrrolidone)polyethylene glycol, polypropylene glycol homopolymers, polypropylene oxide/ethylene oxide co-polymers, polyoxyethylated polyols (e.g., glycerol), polyvinyl alcohol, and mixtures thereof. Polyethylene glycol propionaldehyde may have advantages in manufacturing due to its stability in water. The polymer may be of any molecular weight, and may be branched or unbranched. The number of polymers attached to the antibody may vary, and if more than one polymer is attached, they can be the same or different molecules. In general, the number and/or type of polymers used for derivatization can be determined based on considerations including, but not limited to, the particular properties or functions of the antibody to be improved, whether the antibody derivative will be used in a therapy under defined conditions, etc. Such techniques and other suitable formulations are disclosed in Remington: The Science and Practice of Pharmacy, 20th Ed., Alfonso Gennaro, Ed., Philadelphia College of Pharmacy and Science (2000).

[0409] Drug conjugation involves coupling of a biological active cytotoxic (anticancer) payload or drug to an antibody that specifically targets a certain tumor marker (e.g. a protein that, ideally, is only to be found in or on rumor cells). Antibodies track these proteins down in the body and attach themselves to the surface of cancer cells. The biochemical reaction between the antibody and the target protein (antigen) triggers a signal in the tumor cell, which then absorbs or internalizes the antibody together with the cytotoxin. After the ADC is internalized, the cytotoxic drug is released and kills the cancer. Due to this targeting, ideally the drug has lower side effects and gives a wider therapeutic window than other chemotherapeutic agents. Technics to conjugate antibodies are disclosed are known in the art (see, e.g., Jane de Lartigue, OncLive Jul. 5, 2012; ADC Review on antibody-drug conjugates; and Ducry et al., (2010). Bioconjugate Chemistry 21 (1): 5-13).

[0410] Binding Assays and Other Assays

[0411] Anti-TREM2 antibodies of the present disclosure may be tested for antigen binding activity, e.g., by known methods such as ELISA, Western blot, etc.

[0412] In some embodiments, competition assays may be used to identify an antibody that competes with any of the antibodies listed in Tables 2A, 2B, 3A, 3B, 4A, 4B, 7A, and 7B, selected from 1A7, 3A2, 3B10, 6G12, 6H6, 7A9, 7B3, 8A1, 8E10, 8F11, 8F8, 9F5, 9G1, 9G3, 10A9, 10C1, 11A8, 12E2, 12F9, 12G6, 2C7, 2F5, 3C1, 4D7, 4D11, 6C11, 6G12, 7A3, 7C5, 7E9, 7F6, 7G1, 7H1, 8C3, 8F10, 12A1, 1E9, 2C5, 3C5, 4C12, 4F2, 5A2, 6B3, 7D1, 7D9, 11D8, 8A12, 10E7, 10B11, 10D2, 7D5, 2A7, 3G12, 6H9, 8G9, 9B4, 10A1, 11A8, 12F3, 2F8, 10E3, 1H7, 2F6, 2H8, 3A7, 7E5, 7F8, 11H5, 7C5, 4F11, 12D9, 1B4v1, 1B4v2, 6H2, 7B11v1, 7B11v2, 18D8, 18E4v1, 18E4v2, 29F6v1, 29F6v2, 40D5v1, 40D5v2, 43B9, 44A8v1, 44A8v2, 44B4v1, and 44B4v2 and humanized variants thereof, and/or humanized antibody M7E57291 for binding to TREM2. In certain embodiments, such a competing antibody binds to the same epitope (e.g., a linear or a conformational epitope) that is bound by any of the antibodies listed in Table 1, selected from 4D11, 7C5, 6G12, 8F11, 8E10, 7E5, 7F8, 8F8, 1H7. 2H8. 3A2. 3A7. 3B10, 4F11, 6H6, 7A9, 7B3, 8A1, 9F5, 9G1, 9G3, 10A9, 11A8, 12D9, 12F9, 1B4v1, 1B4v2, 6H2, 7B11v1, 7B11v2, 18D8, 18E4v1, 18E4v2, and their humanized derivatives, and/or human and/or humanized M7E57291. Detailed exemplary methods for mapping an epitope to which an antibody binds are provided in Morris (1996) “Epitope Mapping Protocols,” in Methods in Molecular Biology vol. 66 (Humana Press, Totowa, N.J.).

[0413] In an exemplary competition assay, immobilized TREM2 or cells expressing TREM2 on cell surface are incubated in a solution comprising a first labeled antibody that binds to TREM2 (e.g., human or non-human primate) and a second unlabeled antibody that is being tested for its ability to compete with the first antibody for binding to TREM2. The second antibody may be present in a hybridoma supernatant. As a control, immobilized TREM2 or cells expressing TREM2 is incubated in a solution comprising the first labeled antibody but not the second unlabeled antibody. After incubation under conditions permissive for binding of the first antibody to TREM2, excess unbound antibody is removed, and the amount of label associated with immobilized TREM2 or cells expressing TREM2 is measured. If the amount of label associated with immobilized TREM2 or cells expressing TREM2 is substantially reduced in the test sample relative to the control sample, then that indicates that the second antibody is competing with the first antibody for binding to TREM2. See Harlow and Lane (1988) Antibodies: A Laboratory Manual ch.14 (Cold Spring Harbor Laboratory, Cold Spring Harbor, N.Y.).

### Nucleic Acids, Vectors, and Host Cells

[0414] Anti-TREM2 antibodies of the present disclosure may be produced using recombinant methods and compositions, e.g., as described in U.S. Pat. No. 4,816,567. In some embodiments, isolated nucleic acids having a nucleotide sequence encoding any of the anti-TREM2 antibodies of the present disclosure are provided. Such nucleic acids may encode an amino acid sequence containing the VL and/or an amino acid sequence containing the VH of the anti-TREM2 antibody (e.g., the light and/or heavy chains of the antibody). In some embodiments, one or more vectors (e.g., expression vectors) containing such nucleic acids are provided. In some embodiments, a host cell containing such nucleic acid is also provided. In some embodiments, the host cell contains (e.g., has been transduced with): (1) a vector containing a nucleic acid that encodes an amino acid sequence containing the VL of the antibody and an amino acid sequence containing the VH of the antibody, or (2) a first vector containing a nucleic acid that encodes an amino acid sequence containing the VL of the antibody and a second vector containing a nucleic acid that encodes an amino acid sequence containing the VH of the antibody. In some embodiments, the host cell is eukaryotic, e.g., a Chinese Hamster Ovary (CHO) cell or lymphoid cell (e.g., Y0, NS0, Sp20 cell). Host cells of the present disclosure also include, without limitation, isolated cells, in vitro cultured cells, and ex vivo cultured cells.

[0415] Methods of making an anti-TREM2 antibody of the present disclosure are provided. In some embodiments, the method includes culturing a host cell of the present disclosure containing a nucleic acid encoding the anti-TREM2 antibody, under conditions suitable for expression of the antibody. In some embodiments, the antibody is subsequently recovered from the host cell (or host cell culture medium).

[0416] For recombinant production of an anti-TREM2 antibody of the present disclosure, a nucleic acid encoding the anti-TREM2 antibody is isolated and inserted into one or more vectors for further cloning and/or expression in a host cell. Such nucleic acid may be readily isolated and sequenced using conventional procedures (e.g., by using oligonucleotide probes that are capable of binding specifically to genes encoding the heavy and light chains of the antibody).

[0417] Suitable vectors containing a nucleic acid sequence encoding any of the anti-TREM2 antibodies of the present disclosure, or fragments thereof polypeptides (including antibodies) described herein include, without limitation, cloning vectors and expression vectors. Suitable cloning vectors can be constructed according to standard techniques, or may be selected from a large number of cloning vectors available in the art. While the cloning vector selected may vary according to the host cell intended to be used, useful cloning vectors generally have the ability to self-replicate, may possess a single target for a particular restriction endonuclease, and/or may carry genes for a marker that can be used in selecting clones containing the vector. Suitable examples include plasmids and bacterial viruses, e.g., pUC18, pUC19, Bluescript (e.g., pBS SK+) and its derivatives, mp18, mp19, pBR322, pMB9, ColEl, pCR1, RP4, phage DNAs, and shuttle vectors such as pSA3 and pAT28. These and many other cloning vectors are available from commercial vendors such as BioRad, Strategene, and Invitrogen.

[0418] Expression vectors generally are replicable polynucleotide constructs that contain a nucleic acid of the present disclosure. The expression vector may replicable in the host cells either as episomes or as an integral part of the chromosomal DNA. Suitable expression vectors include but are not limited to plasmids, viral vectors, including adenoviruses, adeno-associated viruses, retroviruses, cosmids, and expression vector(s) disclosed in PCT Publication No. WO 87/04462. Vector components may generally include, but are not limited to, one or more of the following: a signal sequence; an origin of replication; one or more marker genes; suitable transcriptional controlling elements (such as promoters, enhancers and terminator). For expression (i.e., translation), one or more translational controlling elements are also usually required, such as ribosome binding sites, translation initiation sites, and stop codons.

[0419] The vectors containing the nucleic acids of interest can be introduced into the host cell by any of a number of appropriate means, including electroporation, transfection employing calcium chloride, rubidium chloride, calcium phosphate, DEAE-dextran, or other substances; microprojectile bombardment; lipofection; and infection (e.g., where the vector is an infectious agent such as vaccinia virus). The choice of introducing vectors or polynucleotides will often depend on features of the host cell. In some embodiments, the vector contains a nucleic acid containing one or more amino acid sequences encoding an anti-TREM2 antibody of the present disclosure.

[0420] Suitable host cells for cloning or expression of antibody-encoding vectors include prokaryotic or eukaryotic cells. For example, anti-TREM2 antibodies of the present disclosure may be produced in bacteria, in particular when glycosylation and Fc effector function are not needed. For expression of antibody fragments and polypeptides in bacteria (e.g., U.S. Pat. Nos. 5,648,237, 5,789,199, and 5,840,523; and Charlton, Methods in Molecular Biology, Vol. 248 (B. K. C. Lo, ed., Humana Press, Totowa, N.J., 2003), pp. 245-254, describing expression of antibody fragments in E. coli.). After expression, the antibody may be isolated from the bacterial cell paste in a soluble fraction and can be further purified.

[0421] In addition to prokaryotes, eukaryotic microorganisms, such as filamentous fungi or yeast, are also suitable cloning or expression hosts for antibody-encoding vectors, including fungi and yeast strains whose glycosylation pathways have been “humanized,” resulting in the production of an antibody with a partially or fully human glycosylation pattern (e.g., Gerngross, Nat. Biotech. 22:1409-1414 (2004); and Li et al., Nat. Biotech. 24:210-215 (2006)).

[0422] Suitable host cells for the expression of glycosylated antibody can also be derived from multicellular organisms (invertebrates and vertebrates). Examples of invertebrate cells include plant and insect cells. Numerous baculoviral strains have been identified which may be used in conjunction with insect cells, particularly for transfection of Spodoptera frugiperda cells. Plant cell cultures can also be utilized as hosts (e.g., U.S. Pat. Nos. 5,959,177, 6,040,498, 6,420,548, 7,125,978, and 6,417,429, describing PLANTIBODIES™ technology for producing antibodies in transgenic plants.).

[0423] Vertebrate cells may also be used as hosts. For example, mammalian cell lines that are adapted to grow in suspension may be useful. Other examples of useful mammalian host cell lines are monkey kidney CV1 line transformed by SV40 (COS-7); human embryonic kidney line (293 or 293 cells as described, e.g., in Graham et al., J. Gen Virol. 36:59 (1977)); baby hamster kidney cells (BHK); mouse sertoli cells (TM4 cells as described, e.g., in Mather, Biol. Reprod. 23:243-251 (1980)); monkey kidney cells (CV1); African green monkey kidney cells (VERO-76); human cervical carcinoma cells (HELA); canine kidney cells (MDCK; buffalo rat liver cells (BRL 3A); human lung cells (W138); human liver cells (Hep G2); mouse mammary tumor (MMT 060562); TRI cells, as described, e.g., in Mather et al., Annals N.Y. Acad. Sci. 383:44-68 (1982); MRC 5 cells; and FS4 cells. Other useful mammalian host cell lines include Chinese hamster ovary (CHO) cells, including DHFR-CHO cells (Urlaub et al., Proc. Natl. Acad. Sci. USA 77:4216 (1980)); and myeloma cell lines such as YO, NSO and Sp2/0. For a review of certain mammalian host cell lines suitable for antibody production, see, e.g., Yazaki and Wu, Methods in Molecular Biology, Vol. 248 (B. K. C. Lo, ed., Humana Press, Totowa, N.J.), pp. 255-268 (2003).

### Pharmaceutical Compositions

[0424] Anti-TREM2 antibodies of the present disclosure can be incorporated into a variety of formulations for therapeutic administration by combining the antibodies with appropriate pharmaceutically acceptable carriers or diluents, and may be formulated into preparations in solid, semi-solid, liquid or gaseous forms. Examples of such formulations include, without limitation, tablets, capsules, powders, granules, ointments, solutions, suppositories, injections, inhalants, gels, microspheres, and aerosols. Pharmaceutical compositions can include, depending on the formulation desired, pharmaceutically-acceptable, non-toxic carriers of diluents, which are vehicles commonly used to formulate pharmaceutical compositions for animal or human administration. The diluent is selected so as not to affect the biological activity of the combination. Examples of such diluents include, without limitation, distilled water, buffered water, physiological saline, PBS, Ringer's solution, dextrose solution, and Hank's solution. A pharmaceutical composition or formulation of the present disclosure can further include other carriers, adjuvants, or non-toxic, nontherapeutic, nonimmunogenic stabilizers, excipients and the like. The compositions can also include additional substances to approximate physiological conditions, such as pH adjusting and buffering agents, toxicity adjusting agents, wetting agents and detergents.

[0425] A pharmaceutical composition of the present disclosure can also include any of a variety of stabilizing agents, such as an antioxidant for example. When the pharmaceutical composition includes a polypeptide, the polypeptide can be complexed with various well-known compounds that enhance the in vivo stability of the polypeptide, or otherwise enhance its pharmacological properties (e.g., increase the half-life of the polypeptide, reduce its toxicity, and enhance solubility or uptake). Examples of such modifications or complexing agents include, without limitation, sulfate, gluconate, citrate and phosphate. The polypeptides of a composition can also be complexed with molecules that enhance their in vivo attributes. Such molecules include, without limitation, carbohydrates, polyamines, amino acids, other peptides, ions (e.g., sodium, potassium, calcium, magnesium, manganese), and lipids.

[0426] Further examples of formulations that are suitable for various types of administration can be found in Remington's Pharmaceutical Sciences, Mace Publishing Company, Philadelphia, Pa., 17th ed. (1985). For a brief review of methods for drug delivery, see, Langer, Science 249:1527-1533 (1990).

[0427] For oral administration, the active ingredient can be administered in solid dosage forms, such as capsules, tablets, and powders, or in liquid dosage forms, such as elixirs, syrups, and suspensions. The active component(s) can be encapsulated in gelatin capsules together with inactive ingredients and powdered carriers, such as glucose, lactose, sucrose, mannitol, starch, cellulose or cellulose derivatives, magnesium stearate, stearic acid, sodium saccharin, talcum, magnesium carbonate. Examples of additional inactive ingredients that may be added to provide desirable color, taste, stability, buffering capacity, dispersion or other known desirable features are red iron oxide, silica gel, sodium lauryl sulfate, titanium dioxide, and edible white ink. Similar diluents can be used to make compressed tablets. Both tablets and capsules can be manufactured as sustained release products to provide for continuous release of medication over a period of hours. Compressed tablets can be sugar coated or film coated to mask any unpleasant taste and protect the tablet from the atmosphere, or enteric-coated for selective disintegration in the gastrointestinal tract. Liquid dosage forms for oral administration can contain coloring and flavoring to increase patient acceptance.

[0428] Formulations suitable for parenteral administration include aqueous and non-aqueous, isotonic sterile injection solutions, which can contain antioxidants, buffers, bacteriostats, and solutes that render the formulation isotonic with the blood of the intended recipient, and aqueous and non-aqueous sterile suspensions that can include suspending agents, solubilizers, thickening agents, stabilizers, and preservatives.

[0429] The components used to formulate the pharmaceutical compositions are preferably of high purity and are substantially free of potentially harmful contaminants (e.g., at least National Food (NF) grade, generally at least analytical grade, and more typically at least pharmaceutical grade). Moreover, compositions intended for in vivo use are usually sterile. To the extent that a given compound must be synthesized prior to use, the resulting product is typically substantially free of any potentially toxic agents, particularly any endotoxins, which may be present during the synthesis or purification process. Compositions for parental administration are also sterile, substantially isotonic and made under GMP conditions.

[0430] Formulations may be optimized for retention and stabilization in the brain or central nervous system. When the agent is administered into the cranial compartment, it is desirable for the agent to be retained in the compartment, and not to diffuse or otherwise cross the blood brain barrier. Stabilization techniques include cross-linking, multimerizing, or linking to groups such as polyethylene glycol, polyacrylamide, neutral protein carriers, etc. in order to achieve an increase in molecular weight.

[0431] Other strategies for increasing retention include the entrapment of the antibody, such as an anti-TREM2 antibody of the present disclosure, in a biodegradable or bioerodible implant. The rate of release of the therapeutically active agent is controlled by the rate of transport through the polymeric matrix, and the biodegradation of the implant. The transport of drug through the polymer barrier will also be affected by compound solubility, polymer hydrophilicity, extent of polymer cross-linking, expansion of the polymer upon water absorption so as to make the polymer barrier more permeable to the drug, geometry of the implant, and the like. The implants are of dimensions commensurate with the size and shape of the region selected as the site of implantation. Implants may be particles, sheets, patches, plaques, fibers, microcapsules and the like and may be of any size or shape compatible with the selected site of insertion.

[0432] The implants may be monolithic, i.e. having the active agent homogenously distributed through the polymeric matrix, or encapsulated, where a reservoir of active agent is encapsulated by the polymeric matrix. The selection of the polymeric composition to be employed will vary with the site of administration, the desired period of treatment, patient tolerance, the nature of the disease to be treated and the like. Characteristics of the polymers will include biodegradability at the site of implantation, compatibility with the agent of interest, ease of encapsulation, a half-life in the physiological environment.

[0433] Biodegradable polymeric compositions which may be employed may be organic esters or ethers, which when degraded result in physiologically acceptable degradation products, including the monomers. Anhydrides, amides, orthoesters or the like, by themselves or in combination with other monomers, may find use. The polymers will be condensation polymers. The polymers may be cross-linked or non-cross-linked. Of particular interest are polymers of hydroxyaliphatic carboxylic acids, either homo- or copolymers, and polysaccharides. Included among the polyesters of interest are polymers of D-lactic acid, L-lactic acid, racemic lactic acid, glycolic acid, polycaprolactone, and combinations thereof. By employing the L-lactate or D-lactate, a slowly biodegrading polymer is achieved, while degradation is substantially enhanced with the racemate. Copolymers of glycolic and lactic acid are of particular interest, where the rate of biodegradation is controlled by the ratio of glycolic to lactic acid. The most rapidly degraded copolymer has roughly equal amounts of glycolic and lactic acid, where either homopolymer is more resistant to degradation. The ratio of glycolic acid to lactic acid will also affect the brittleness of in the implant, where a more flexible implant is desirable for larger geometries. Among the polysaccharides of interest are calcium alginate, and functionalized celluloses, particularly carboxymethylcellulose esters characterized by being water insoluble, a molecular weight of about 5 kD to 500 kD, etc. Biodegradable hydrogels may also be employed in the implants of the subject invention. Hydrogels are typically a copolymer material, characterized by the ability to imbibe a liquid. Exemplary biodegradable hydrogels which may be employed are described in Heller in: Hydrogels in Medicine and Pharmacy, N. A. Peppes ed., Vol. III, CRC Press, Boca Raton, Fla., 1987, pp 137-149.

[0434] Pharmaceutical Dosages

[0435] Pharmaceutical compositions of the present disclosure containing an anti-TREM2 antibody of the present disclosure may be administered to an individual in need of treatment with the anti-TREM2 antibody, preferably a human, in accord with known methods, such as intravenous administration as a bolus or by continuous infusion over a period of time, by intramuscular, intraperitoneal, intracerobrospinal, intracranial, intraspinal, subcutaneous, intra-articular, intrasynovial, intrathecal, oral, topical, or inhalation routes.

[0436] Dosages and desired drug concentration of pharmaceutical compositions of the present disclosure may vary depending on the particular use envisioned. The determination of the appropriate dosage or route of administration is well within the skill of an ordinary artisan. Animal experiments provide reliable guidance for the determination of effective doses for human therapy. Interspecies scaling of effective doses can be performed following the principles described in Mordenti, J. and Chappell, W. “The Use of Interspecies Scaling in Toxicokinetics,” In Toxicokinetics and New Drug Development, Yacobi et al., Eds, Pergamon Press, New York 1989, pp. 42-46.

[0437] For in vivo administration of any of the anti-TREM2 antibodies of the present disclosure, normal dosage amounts may vary from about 10 ng/kg up to about 100 mg/kg of an individual's body weight or more per day, preferably about 1 mg/kg/day to 10 mg/kg/day, depending upon the route of administration. For repeated administrations over several days or longer, depending on the severity of the disease, disorder, or condition to be treated, the treatment is sustained until a desired suppression of symptoms is achieved.

[0438] An exemplary dosing regimen may include administering an initial dose of an anti-TREM2 antibody, of about 2 mg/kg, followed by a weekly maintenance dose of about 1 mg/kg every other week. Other dosage regimens may be useful, depending on the pattern of pharmacokinetic decay that the physician wishes to achieve. For example, dosing an individual from one to twenty-one times a week is contemplated herein. In certain embodiments, dosing ranging from about 3 μg/kg to about 2 mg/kg (such as about 3 μg/kg, about 10 μg/kg, about 30 μg/kg, about 100 μg/kg, about 300 μg/kg, about 1 mg/kg, and about 2/mg/kg) may be used. In certain embodiments, dosing frequency is three times per day, twice per day, once per day, once every other day, once weekly, once every two weeks, once every four weeks, once every five weeks, once every six weeks, once every seven weeks, once every eight weeks, once every nine weeks, once every ten weeks, or once monthly, once every two months, once every three months, or longer. Progress of the therapy is easily monitored by conventional techniques and assays. The dosing regimen, including the anti-TREM2 antibody administered, can vary over time independently of the dose used.

[0439] Dosages for a particular anti-TREM2 antibody may be determined empirically in individuals who have been given one or more administrations of the anti-TREM2 antibody. Individuals are given incremental doses of an anti-TREM2 antibody. To assess efficacy of an anti-TREM2 antibody, a clinical symptom of ay of the diseases, disorders, or conditions of the present disclosure (e.g., dementia, frontotemporal dementia, Alzheimer's disease, Nasu-Hakola disease, and multiple sclerosis) can be monitored.

[0440] Administration of an anti-TREM2 antibody of the present disclosure can be continuous or intermittent, depending, for example, on the recipient's physiological condition, whether the purpose of the administration is therapeutic or prophylactic, and other factors known to skilled practitioners. The administration of an anti-TREM2 antibody may be essentially continuous over a preselected period of time or may be in a series of spaced doses.

[0441] Guidance regarding particular dosages and methods of delivery is provided in the literature; see, for example, U.S. Pat. No. 4,657,760; 5,206,344; or 5,225,212. It is within the scope of the present disclosure that different formulations will be effective for different treatments and different disorders, and that administration intended to treat a specific organ or tissue may necessitate delivery in a manner different from that to another organ or tissue. Moreover, dosages may be administered by one or more separate administrations, or by continuous infusion. For repeated administrations over several days or longer, depending on the condition, the treatment is sustained until a desired suppression of disease symptoms occurs. However, other dosage regimens may be useful. The progress of this therapy is easily monitored by conventional techniques and assays.

### Therapeutic Uses

[0442] Further aspects of the present disclosure provide methods for modulating (e.g., activating or inhibiting) TREM2, modulating (e.g., activating or inhibiting) DAP12, modulating (e.g., activating or inhibiting) PI3K, modulating (e.g., increasing or reducing) expression of one or more pro- and anti-inflammatory mediators (e.g., IFN-α4, IFN-b, IL-1(3, TNF-α, IL-10, IL-6, IL-8, IL-23, TGF-beta members of the chemokine protein families, IL-20 family members, IL-33, LIF, IFN-gamma, OSM, CNTF, TGF-beta, GM-CSF, IL-11, IL-12, IL-17, IL-18, IL-23, CCL4, MCP-1, VEGF, CXCL10 and CRP) or, modulating (e.g., increasing or reducing) survival of one or more TREM2 expressing cells or, modulating (e.g., increasing or reducing) functionality of one or more TREM2 expressing cells, or, modulating (e.g., increasing or reducing) proliferation of one or more TREM2 expressing cells or, or, modulating (e.g., increasing or reducing) migration of one or more TREM2 expressing cells, or, modulating (e.g., increasing or reducing) interaction with other cells of one or more TREM2 expressing cells in an individual in need thereof, by administering to the individual a therapeutically effective amount of an anti-TREM2 antibody of the present disclosure to modulate (e.g., induce or inhibit) one or more TREM2 activities in the individual.

[0443] As disclosed herein, anti-TREM2 antibodies of the present disclosure may be used for preventing, reducing risk, or treating dementia, frontotemporal dementia, Alzheimer's disease, vascular dementia, mixed dementia, Creutzfeldt-Jakob disease, normal pressure hydrocephalus, amyotrophic lateral sclerosis, Huntington's disease, tauopathy disease, Nasu-Hakola disease, stroke, acute trauma, chronic trauma, cognitive deficit, memory loss, lupus, acute and chronic colitis, rheumatoid arthritis, wound healing, Crohn's disease, inflammatory bowel disease, ulcerative colitis, obesity, malaria, essential tremor, central nervous system lupus, Behcet's disease, Parkinson's disease, dementia with Lewy bodies, multiple system atrophy, Shy-Drager syndrome, progressive supranuclear palsy, cortical basal ganglionic degeneration, acute disseminated encephalomyelitis, granulomartous disorders, sarcoidosis, diseases of aging, seizures, spinal cord injury, traumatic brain injury, age related macular degeneration, glaucoma, retinitis pigmentosa, retinal degeneration, respiratory tract infection, sepsis, eye infection, systemic infection, lupus, arthritis, multiple sclerosis, low bone density, osteoporosis, osteogenesis, osteopetrotic disease, Paget's disease of bone, cancer, bladder cancer, brain cancer, breast cancer, colon cancer, rectal cancer, endometrial cancer, kidney cancer, renal cell cancer, renal pelvis cancer, leukemia, lung cancer, melanoma, non-Hodgkin's lymphoma, pancreatic cancer, prostate cancer, ovarian cancer, fibrosarcoma, acute lymphoblastic leukemia (ALL), acute myeloid leukemia (AML), chronic lymphocytic leukemia (CLL), chronic myeloid leukemia (CML), multiple myeloma, polycythemia vera, essential thrombocytosis, primary or idiopathic myelofibrosis, primary or idiopathic myelosclerosis, myeloid-derived tumors, tumors that express TREM2, thyroid cancer, infections, CNS herpes, parasitic infections, Trypanosome infection, Cruzi infection, Pseudomonas aeruginosa infection, Leishmania donovani infection, group B Streptococcus infection, Campylobacter jejuni infection, Neisseria meningiditis infection, type I HIV, and/or Haemophilus influenza. In some embodiments, the anti-TREM2 antibodies are agonist antibodies.

[0444] In some embodiments, the present disclosure provides methods of preventing, reducing risk, or treating an individual having dementia, frontotemporal dementia, Alzheimer's disease, vascular dementia, mixed dementia, Creutzfeldt-Jakob disease, normal pressure hydrocephalus, amyotrophic lateral sclerosis, Huntington's disease, tauopathy disease, Nasu-Hakola disease, stroke, acute trauma, chronic trauma, cognitive deficit, memory loss, lupus, acute and chronic colitis, rheumatoid arthritis, wound healing, Crohn's disease, inflammatory bowel disease, ulcerative colitis, obesity, malaria, essential tremor, central nervous system lupus, Behcet's disease, Parkinson's disease, dementia with Lewy bodies, multiple system atrophy, Shy-Drager syndrome, progressive supranuclear palsy, cortical basal ganglionic degeneration, acute disseminated encephalomyelitis, granulomartous disorders, sarcoidosis, diseases of aging, seizures, spinal cord injury, traumatic brain injury, age related macular degeneration, glaucoma, retinitis pigmentosa, retinal degeneration, respiratory tract infection, sepsis, eye infection, systemic infection, lupus, arthritis, multiple sclerosis, low bone density, osteoporosis, osteogenesis, osteopetrotic disease, Paget's disease of bone, cancer, bladder cancer, brain cancer, breast cancer, colon cancer, rectal cancer, endometrial cancer, kidney cancer, renal cell cancer, renal pelvis cancer, leukemia, lung cancer, melanoma, non-Hodgkin's lymphoma, pancreatic cancer, prostate cancer, ovarian cancer, fibrosarcoma, acute lymphoblastic leukemia (ALL), acute myeloid leukemia (AML), chronic lymphocytic leukemia (CLL), chronic myeloid leukemia (CML), multiple myeloma, polycythemia vera, essential thrombocytosis, primary or idiopathic myelofibrosis, primary or idiopathic myelosclerosis, myeloid-derived tumors, tumors that express TREM2, thyroid cancer, infections, CNS herpes, parasitic infections, Trypanosome infection, Cruzi infection, Pseudomonas aeruginosa infection, Leishmania donovani infection, group B Streptococcus infection, Campylobacter jejuni infection, Neisseria meningiditis infection, type I HIV, and Haemophilus influenza, by administering to the individual a therapeutically effective amount of an anti-TREM2 antibody of the present disclosure. In some embodiments, the anti-TREM2 antibody is an agonist antibody. In some embodiments, the anti-TREM2 antibody is an inert antibody. In some embodiments, the anti-TREM2 antibody is an antagonist antibody. In some embodiments, the method further includes administering to the individual at least one antibody that specifically binds to an inhibitory checkpoint molecule, and/or another standard or investigational anti-cancer therapy. In some embodiments, the antibody that specifically binds to an inhibitory checkpoint molecule is administered in combination with the isolated antibody. In some embodiments, the at least one antibody that specifically binds to an inhibitory checkpoint molecule is selected from an anti-PD-L1 antibody, an anti-CTLA-4 antibody, an anti-PD-L2 antibody, an anti-PD-1 antibody, an anti-B7-H3 antibody, an anti-B7-H4 antibody, and anti-HVEM antibody, an anti-B- and T-lymphocyte attenuator (BTLA) antibody, an anti-Killer inhibitory receptor (KIR) antibody, an anti-GALS antibody, an anti-TIM3 antibody, an anti-AZAR antibody, an anti-LAG-3 antibody, an anti-phosphatidylserine antibody, an anti-CD27 antibody, and any combination thereof. In some embodiments, the standard or investigational anti-cancer therapy is one or more therapies selected from radiotherapy, cytotoxic chemotherapy, targeted therapy, hormonal therapy, imatinib (Gleevec®), trastuzumab (Herceptin®), bevacizumab (Avastin®), Ofatumumab (Arzerra®), Rituximab (Rituxan®, MabThera®, Zytux®), cryotherapy, ablation, radiofrequency ablation, adoptive cell transfer (ACT), chimeric antigen receptor T cell transfer (CAR-T), vaccine therapy, and cytokine therapy. In some embodiments, the method further includes administering to the individual at least one antibody that specifically binds to an inhibitory cytokine. In some embodiments, the at least one antibody that specifically binds to an inhibitory cytokine is administered in combination with the isolated antibody. In some embodiments, the at least one antibody that specifically binds to an inhibitory cytokine is selected from an anti-CCL2 antibody, an anti-CSF-1 antibody, an anti-IL-2 antibody, and any combination thereof. In some embodiments, the method further includes administering to the individual at least one agonistic antibody that specifically binds to a stimulatory checkpoint protein. In some embodiments, the at least one agonistic antibody that specifically binds to a stimulatory checkpoint protein is administered in combination with the isolated antibody. In some embodiments, the at least one agonistic antibody that specifically binds to a stimulatory checkpoint protein is selected from an agonist anti-CD40 antibody, an agonist anti-0X40 antibody, an agonist anti-ICOS antibody, an agonist anti-CD28 antibody, an agonist anti-CD137/4-1BB antibody, an agonist anti-CD27 antibody, an agonist anti-glucocorticoid-induced TNFR-related protein GITR antibody, and any combination thereof. In some embodiments, the method further includes administering to the individual at least one stimulatory cytokine. In some embodiments, the at least one stimulatory cytokine is administered in combination with the isolated antibody. In some embodiments, the at least one stimulatory cytokine is selected from TNF-α, IL-10, IL-6, IL-8, CRP, TGF-beta members of the chemokine protein families, IL20 family member, IL-33, LIF, OSM, CNTF, TGF-beta, IL-11, IL-12, IL-17, IL-8, IL-23, IFN-α, IFN-β, IL-2, IL-18, GM-CSF, G-CSF, and any combination thereof.

[0445] In some embodiments, the present disclosure provides methods of preventing, reducing risk, or treating an individual having Alzheimer's disease by administering to the individual a therapeutically effective amount of an anti-TREM2 antibody of the present disclosure. In some embodiments, the anti-TREM2 antibody is an agonist antibody. In some embodiments, the anti-TREM2 antibody increases expression of one or more inflammatory mediators, such as IL-1β, TNF-α, YM-1, CD86, CCL2, CCL3, CCL5, CCR2, CXCL10, Gata3, Rorc, and any combination thereof. In some embodiments, the anti-TREM2 antibody decreases expression of one or more inflammatory mediators, such as FLT1, OPN, CSF-1, CD11c, AXL, and any combination thereof. In some embodiments, the anti-TREM2 antibody decreases levels of Abeta peptide in the individual (e.g., in the brain of the individual). In some embodiments, the anti-TREM2 antibody increases the number of CD11b⁺ microglial cells in the brain of the individual. In some embodiments, the anti-TREM2 antibody increases memory in the individual. In some embodiments, the anti-TREM2 antibody reduces cognitive deficit in the individual. In some embodiments, the anti-TREM2 antibody increases motor coordination in the individual.

[0446] In some embodiments, the present disclosure provides methods of increasing memory, reducing cognitive deficit, or both in an individual in need thereof, by administering to the individual a therapeutically effective amount of an anti-TREM2 antibody of the present disclosure. In some embodiments, the anti-TREM2 antibody is an agonist antibody.

[0447] In some embodiments, the present disclosure provides methods of increasing motor coordination in an individual in need thereof, by administering to the individual a therapeutically effective amount of an anti-TREM2 antibody of the present disclosure. In some embodiments, the anti-TREM2 antibody is an agonist antibody.

[0448] In some embodiments, the present disclosure provides methods of reducing Abeta peptide levels in an individual in need thereof, by administering to the individual a therapeutically effective amount of an anti-TREM2 antibody of the present disclosure. In some embodiments, the anti-TREM2 antibody is an agonist antibody.

[0449] In some embodiments, the present disclosure provides methods of increasing the number of CD11b⁺ microglial cells in an individual in need thereof, by administering to the individual a therapeutically effective amount of an anti-TREM2 antibody of the present disclosure. In some embodiments, the anti-TREM2 antibody is an agonist antibody.

[0450] In some embodiments, the present disclosure provides methods of increasing levels of one or more of FLT1, OPNCSF1, CD11c, and AXL in an individual in need thereof, by administering to the individual a therapeutically effective amount of an anti-TREM2 antibody of the present disclosure. In some embodiments, the anti-TREM2 antibody is an agonist antibody.

[0451] In some embodiments, an anti-TREM2 antibody of the present disclosure may increases expression of one or more inflammatory mediators, such as IL-1β, TNF-α, YM-1, CD86, CCL2, CCL3, CCL5, CCR2, CXCL10, Gata3, Rorc, and any combination thereof in one or more cells of an individual by at least 10%, at least 15%, at least 20%, at least 25%, at least 30%, at least 35%, at least 40%, at least 45%, at least 50%, at least 55%, at least 60%, at least 65%, at least 70%, at least 75%, at least 80%, at least 85%, at least 90%, at least 95%, at least 100%, at least 110%, at least 115%, at least 120%, at least 125%, at least 130%, at least 135%, at least 140%, at least 145%, at least 150%, at least 160%, at least 170%, at least 180%, at least 190%, or at least 200% for example, as compared to expression of one or more inflammatory mediators, such as IL-1β, TNF-α, YM-1, CD86, CCL2, CCL3, CCL5, CCR2, CXCL10, Gata3, Rorc, and any combination thereof in one or more cells of a corresponding individual that is not treated with the anti-TREM2 antibody. In other embodiments, an anti-TREM2 antibody of the present disclosure increases expression of one or more inflammatory mediators, such as IL-1β, TNF-α, YM-1, CD86, CCL2, CCL3, CCL5, CCR2, CXCL10, Gata3, Rorc, and any combination thereof in one or more cells of an individual by at least 1.5 fold, at least 1.6 fold, at least 1.7 fold, at least 1.8 fold, at least 1.9 fold, at least 2.0 fold, at least 2.1 fold, at least 2.15 fold, at least 2.2 fold, at least 2.25 fold, at least 2.3 fold, at least 2.35 fold, at least 2.4 fold, at least 2.45 fold, at least 2.5 fold, at least 2.55 fold, at least 3.0 fold, at least 3.5 fold, at least 4.0 fold, at least 4.5 fold, at least 5.0 fold, at least 5.5 fold, at least 6.0 fold, at least 6.5 fold, at least 7.0 fold, at least 7.5 fold, at least 8.0 fold, at least 8.5 fold, at least 9.0 fold, at least 9.5 fold, or at least 10 fold, for example, as compared to expression of one or more inflammatory mediators, such as IL-1β, TNF-α, YM-1, CD86, CCL2, CCL3, CCL5, CCR2, CXCL10, Gata3, Rorc, and any combination thereof in one or more cells of a corresponding individual that is not treated with the anti-TREM2 antibody.

[0452] In some embodiments, an anti-TREM2 antibody of the present disclosure may decreases expression of one or more inflammatory mediators, such as FLT1, OPN, CSF-1, CD11c, AXL, and any combination thereof in one or more cells of an individual by at least 10%, at least 15%, at least 20%, at least 25%, at least 30%, at least 35%, at least 40%, at least 45%, at least 50%, at least 55%, at least 60%, at least 65%, at least 70%, at least 75%, at least 80%, at least 85%, at least 90%, at least 95%, at least 100%, at least 110%, at least 115%, at least 120%, at least 125%, at least 130%, at least 135%, at least 140%, at least 145%, at least 150%, at least 160%, at least 170%, at least 180%, at least 190%, or at least 200% for example, as compared to expression of one or more inflammatory mediators, such as FLT1, OPN, CSF-1, CD11c, AXL, and any combination thereof in one or more cells of a corresponding individual that is not treated with the anti-TREM2 antibody. In other embodiments, an anti-TREM2 antibody of the present disclosure decreases expression of one or more inflammatory mediators, such as FLT1, OPN, CSF-1, CD11c, AXL, and any combination thereof in one or more cells of an individual by at least 1.5 fold, at least 1.6 fold, at least 1.7 fold, at least 1.8 fold, at least 1.9 fold, at least 2.0 fold, at least 2.1 fold, at least 2.15 fold, at least 2.2 fold, at least 2.25 fold, at least 2.3 fold, at least 2.35 fold, at least 2.4 fold, at least 2.45 fold, at least 2.5 fold, at least 2.55 fold, at least 3.0 fold, at least 3.5 fold, at least 4.0 fold, at least 4.5 fold, at least 5.0 fold, at least 5.5 fold, at least 6.0 fold, at least 6.5 fold, at least 7.0 fold, at least 7.5 fold, at least 8.0 fold, at least 8.5 fold, at least 9.0 fold, at least 9.5 fold, or at least 10 fold, for example, as compared to expression of one or more inflammatory mediators, such as FLT1, OPN, CSF-1, CD11c, AXL, and any combination thereof in one or more cells of a corresponding individual that is not treated with the anti-TREM2 antibody.

[0453] In some embodiments, an anti-TREM2 antibody of the present disclosure may decrease levels of Abeta peptide in one or more cells of an individual by at least 10%, at least 15%, at least 20%, at least 25%, at least 30%, at least 35%, at least 40%, at least 45%, at least 50%, at least 55%, at least 60%, at least 65%, at least 70%, at least 75%, at least 80%, at least 85%, at least 90%, at least 95%, at least 100%, at least 110%, at least 115%, at least 120%, at least 125%, at least 130%, at least 135%, at least 140%, at least 145%, at least 150%, at least 160%, at least 170%, at least 180%, at least 190%, or at least 200% for example, as compared to levels of Abeta peptide in one or more cells of a corresponding individual that is not treated with the anti-TREM2 antibody. In other embodiments, an anti-TREM2 antibody of the present disclosure decreases levels of Abeta peptide in one or more cells of an individual by at least 1.5 fold, at least 1.6 fold, at least 1.7 fold, at least 1.8 fold, at least 1.9 fold, at least 2.0 fold, at least 2.1 fold, at least 2.15 fold, at least 2.2 fold, at least 2.25 fold, at least 2.3 fold, at least 2.35 fold, at least 2.4 fold, at least 2.45 fold, at least 2.5 fold, at least 2.55 fold, at least 3.0 fold, at least 3.5 fold, at least 4.0 fold, at least 4.5 fold, at least 5.0 fold, at least 5.5 fold, at least 6.0 fold, at least 6.5 fold, at least 7.0 fold, at least 7.5 fold, at least 8.0 fold, at least 8.5 fold, at least 9.0 fold, at least 9.5 fold, or at least 10 fold, for example, as compared to levels of Abeta peptide in one or more cells of a corresponding individual that is not treated with the anti-TREM2 antibody.

[0454] In some embodiments, an anti-TREM2 antibody of the present disclosure may increase memory of an individual by at least 10%, at least 15%, at least 20%, at least 25%, at least 30%, at least 35%, at least 40%, at least 45%, at least 50%, at least 55%, at least 60%, at least 65%, at least 70%, at least 75%, at least 80%, at least 85%, at least 90%, at least 95%, at least 100%, at least 110%, at least 115%, at least 120%, at least 125%, at least 130%, at least 135%, at least 140%, at least 145%, at least 150%, at least 160%, at least 170%, at least 180%, at least 190%, or at least 200% for example, as compared to the memory of a corresponding individual that is not treated with the anti-TREM2 antibody. In other embodiments, an anti-TREM2 antibody of the present disclosure increases memory of an individual by at least 1.5 fold, at least 1.6 fold, at least 1.7 fold, at least 1.8 fold, at least 1.9 fold, at least 2.0 fold, at least 2.1 fold, at least 2.15 fold, at least 2.2 fold, at least 2.25 fold, at least 2.3 fold, at least 2.35 fold, at least 2.4 fold, at least 2.45 fold, at least 2.5 fold, at least 2.55 fold, at least 3.0 fold, at least 3.5 fold, at least 4.0 fold, at least 4.5 fold, at least 5.0 fold, at least 5.5 fold, at least 6.0 fold, at least 6.5 fold, at least 7.0 fold, at least 7.5 fold, at least 8.0 fold, at least 8.5 fold, at least 9.0 fold, at least 9.5 fold, or at least 10 fold, for example, as compared to the memory of a corresponding individual that is not treated with the anti-TREM2 antibody.

[0455] In some embodiments, an anti-TREM2 antibody of the present disclosure may reduce cognitive deficit in an individual by at least 10%, at least 15%, at least 20%, at least 25%, at least 30%, at least 35%, at least 40%, at least 45%, at least 50%, at least 55%, at least 60%, at least 65%, at least 70%, at least 75%, at least 80%, at least 85%, at least 90%, at least 95%, at least 100%, at least 110%, at least 115%, at least 120%, at least 125%, at least 130%, at least 135%, at least 140%, at least 145%, at least 150%, at least 160%, at least 170%, at least 180%, at least 190%, or at least 200% for example, as compared to cognitive deficit in a corresponding individual that is not treated with the anti-TREM2 antibody. In other embodiments, an anti-TREM2 antibody of the present disclosure reduces cognitive deficit an individual by at least 1.5 fold, at least 1.6 fold, at least 1.7 fold, at least 1.8 fold, at least 1.9 fold, at least 2.0 fold, at least 2.1 fold, at least 2.15 fold, at least 2.2 fold, at least 2.25 fold, at least 2.3 fold, at least 2.35 fold, at least 2.4 fold, at least 2.45 fold, at least 2.5 fold, at least 2.55 fold, at least 3.0 fold, at least 3.5 fold, at least 4.0 fold, at least 4.5 fold, at least 5.0 fold, at least 5.5 fold, at least 6.0 fold, at least 6.5 fold, at least 7.0 fold, at least 7.5 fold, at least 8.0 fold, at least 8.5 fold, at least 9.0 fold, at least 9.5 fold, or at least 10 fold, for example, as compared to cognitive deficit in a corresponding individual that is not treated with the anti-TREM2 antibody.

[0456] In some embodiments, an anti-TREM2 antibody of the present disclosure may increase motor coordination in an individual by at least 10%, at least 15%, at least 20%, at least 25%, at least 30%, at least 35%, at least 40%, at least 45%, at least 50%, at least 55%, at least 60%, at least 65%, at least 70%, at least 75%, at least 80%, at least 85%, at least 90%, at least 95%, at least 100%, at least 110%, at least 115%, at least 120%, at least 125%, at least 130%, at least 135%, at least 140%, at least 145%, at least 150%, at least 160%, at least 170%, at least 180%, at least 190%, or at least 200% for example, as compared to motor coordination in a corresponding individual that is not treated with the anti-TREM2 antibody. In other embodiments, an anti-TREM2 antibody of the present disclosure increases motor coordination an individual by at least 1.5 fold, at least 1.6 fold, at least 1.7 fold, at least 1.8 fold, at least 1.9 fold, at least 2.0 fold, at least 2.1 fold, at least 2.15 fold, at least 2.2 fold, at least 2.25 fold, at least 2.3 fold, at least 2.35 fold, at least 2.4 fold, at least 2.45 fold, at least 2.5 fold, at least 2.55 fold, at least 3.0 fold, at least 3.5 fold, at least 4.0 fold, at least 4.5 fold, at least 5.0 fold, at least 5.5 fold, at least 6.0 fold, at least 6.5 fold, at least 7.0 fold, at least 7.5 fold, at least 8.0 fold, at least 8.5 fold, at least 9.0 fold, at least 9.5 fold, or at least 10 fold, for example, as compared to motor coordination in a corresponding individual that is not treated with the anti-TREM2 antibody.

[0457] Other aspects of the present disclosure relate to methods of enhancing one or more TREM2 activities induced by binding of one or more TREM2 ligands to a TREM2 protein in an individual in need thereof, by administering to the individual a therapeutically effective amount of an anti-TREM2 antibody of the present disclosure. Other aspects of the present disclosure relate to methods of inducing one or more TREM2 activities in an individual in need thereof, by administering to the individual a therapeutically effective amount of an anti-TREM2 antibody of the present disclosure. Any suitable method for measuring TREM2 activity, such as the in vitro cell-based assays or in vivo models of the present disclosure may be used. Exemplary TREM2 activities include, without limitation, TREM2 binding to DAP12; TREM2 phosphorylation; DAP12 phosphorylation; activation of one or more tyrosine kinases, optionally where the one or more tyrosine kinases comprise a Syk kinase, ZAP70 kinase, or both; activation of phosphatidylinositol 3-kinase (PI3K); activation of protein kinase B (Akt); recruitment of phospholipase C-gamma (PLC-gamma) to a cellular plasma membrane, activation of PLC-gamma, or both; recruitment of TEC-family kinase dVav to a cellular plasma membrane; activation of nuclear factor-rB (NF-rB); inhibition of MAPK signaling; phosphorylation of linker for activation of T cells (LAT), linker for activation of B cells (LAB), or both; activation of IL-2-induced tyrosine kinase (Itk); transient activation followed by inhibition of one or more pro-inflammatory mediators selected from IFN-α4, IFN-b, TNF-α, IL-10, IL-6, IL-8, CRP, TGF-beta members of the chemokine protein families, IL-20 family members, IL-33, LIF, IFN-gamma, OSM, CNTF, TGF-beta, GM-CSF, IL-11, IL-12, IL-17, IL-18, IL-23, CXCL10, VEGF, CCL4, and MCP-1, optionally where the transient activation followed by inhibition occur in one or more cells selected from macrophages, M1 macrophages, activated M1 macrophages, M2 macrophages, dendritic cells, monocytes, osteoclasts, Langerhans cells of skin, Kupffer cells, and microglial cells; phosphorylation of extracellular signal-regulated kinase (ERK); increased expression of C-C chemokine receptor 7 (CCR7) in one or more cells selected from macrophages, M1 macrophages, activated M1 macrophages, M2 macrophages, dendritic cells, monocytes, osteoclasts, Langerhans cells of skin, Kupffer cells, microglia, M1 microglia, activated M1 microglia, and M2 microglia, and any combination thereof; induction of microglial cell chemotaxis toward CCL19 and CCL21 expressing cells; normalization of disrupted TREM2/DAP12-dependent gene expression; recruitment of Syk, ZAP70, or both to a DAP12/TREM2 complex; increasing activity of one or more TREM2-dependent genes, optionally where the one or more TREM2-dependent genes comprise nuclear factor of activated T-cells (NFAT) transcription factors; increased maturation of dendritic cells, monocytes, microglia, M1 microglia, activated M1 microglia, and M2 microglia, macrophages, M1 macrophages, activated M1 macrophages, M2 macrophages, or any combination thereof; increased ability of dendritic cells, monocytes, microglia, M1 microglia, activated M1 microglia, and M2 microglia, macrophages, M1 macrophages, activated M1 macrophages, M2 macrophages, or any combination thereof to induce T-cell proliferation; enhanced ability, normalized ability, or both of bone marrow-derived dendritic cells to induce antigen-specific T-cell proliferation; induction of osteoclast production, increased rate of osteoclastogenesis, or both; increased survival of dendritic cells, macrophages, M1 macrophages, activated M1 macrophages, M2 macrophages, monocytes, osteoclasts, Langerhans cells of skin, Kupffer cells, microglia, M1 microglia, activated M1 microglia, and M2 microglia, or any combination thereof; increasing the function of dendritic cells, macrophages, M1 macrophages, activated M1 macrophages, M2 macrophages, microglia, M1 microglia, activated M1 microglia, and M2 microglia, or any combination thereof; modulating phagocytosis by dendritic cells, macrophages, M1 macrophages, activated M1 macrophages, M2 macrophages, monocytes, microglia, M1 microglia, activated M1 microglia, and M2 microglia, or any combination thereof; induction of one or more types of clearance selected from apoptotic neuron clearance, nerve tissue debris clearance, non-nerve tissue debris clearance, bacteria or other foreign body clearance, disease-causing agent clearance, tumor cell clearance, or any combination thereof, optionally where the disease-causing agent is selected from amyloid beta or fragments thereof, Tau, IAPP, alpha-synuclein, TDP-43, FUS protein, prion protein, PrPSc, huntingtin, calcitonin, superoxide dismutase, ataxin, Lewy body, atrial natriuretic factor, islet amyloid polypeptide, insulin, apolipoprotein AI, serum amyloid A, medin, prolactin, transthyretin, lysozyme, beta 2 microglobulin, gelsolin, keratoepithelin, cystatin, immunoglobulin light chain AL, S-IBM protein, and Repeat-associated non-ATG (RAN) translation products including DiPeptide Repeats, (DPRs peptides) composed of glycine-alanine (GA), glycine-proline (GP), glycine-arginine (GR), proline-alanine (PA), or proline-arginine (PR), antisense GGCCCC (G2C4) repeat-expansion RNA; induction of phagocytosis of one or more of apoptotic neurons, nerve tissue debris, non-nerve tissue debris, bacteria, other foreign bodies, disease-causing agents, tumor cells, or any combination thereof, optionally where the disease-causing agent is selected from amyloid beta or fragments thereof, Tau, IAPP, alpha-synuclein, TDP-43, FUS protein, prion protein, PrPSc, huntingtin, calcitonin, superoxide dismutase, ataxin, Lewy body, atrial natriuretic factor, islet amyloid polypeptide, insulin, apolipoprotein AI, serum amyloid A, medin, prolactin, transthyretin, lysozyme, beta 2 microglobulin, gelsolin, keratoepithelin, cystatin, immunoglobulin light chain AL, S-IBM protein, and Repeat-associated non-ATG (RAN) translation products including DiPeptide Repeats, (DPRs peptides) composed of glycine-alanine (GA), glycine-proline (GP), glycine-arginine (GR), proline-alanine (PA), or proline-arginine (PR), antisense GGCCCC (G2C4) repeat-expansion RNA; increased expression of one or more stimulatory molecules selected from CD83, CD86 MHC class II, CD40, and any combination thereof, optionally where the CD40 is expressed on dendritic cells, monocytes, macrophages, or any combination thereof, and optionally where the dendritic cells comprise bone marrow-derived dendritic cells; reduced secretion of one or more inflammatory mediators, optionally where the one or more inflammatory mediators are selected from CD86, IFN-a4, IFN-b, IL-1β, TNF-α, IL-10, IL-6, IL-8, CRP, TGF-beta members of the chemokine protein families, IL-20 family members, IL-33, LIF, IFN-gamma, OSM, CNTF, TGF-beta, GM-CSF, IL-11, IL-12, IL-17, IL-18, IL-23, CXCL10, VEGF, CCL4, and MCP-1, and any combination thereof; increased memory; and reduced cognitive deficit.

[0458] As disclosed herein, anti-TREM2 antibodies of the present disclosure may be used for decreasing cellular levels of TREM2 on one or more cells, including without limitation, dendritic cells, bone marrow-derived dendritic cells, monocytes, microglia, macrophages, neutrophils, NK cells, osteoclasts, Langerhans cells of skin, and Kupffer cells and/or cell lines. In some embodiments, the present disclosure provides methods of decreasing cellular levels of TREM2 on one or more cells in an individual in need thereof, by administering to the individual a therapeutically effective amount of an anti-TREM2 antibody of the present disclosure. In some embodiments, the one or more cells are selected from dendritic cells, bone marrow-derived dendritic cells, monocytes, microglia, macrophages, neutrophils, NK cells, osteoclasts, Langerhans cells of skin, and Kupffer cells, and any combination thereof. Cellular levels of TREM2 may refer to, without limitation, cell surface levels of TREM2, intracellular levels of TREM2, and total levels of TREM2. In some embodiments, a decrease in cellular levels of TREM2 comprises decrease in cell surface levels of TREM2. As used herein, cell surface levels of TREM2 may be measured by any in vitro cell-based assays or suitable in vivo model described herein or known in the art. In some embodiments, a decrease in cellular levels of TREM2 comprises a decrease in intracellular levels of TREM2. As used herein, intracellular levels of TREM2 may be measured by any in vitro cell-based assays or suitable in vivo model described herein or known in the art. In some embodiments, a decrease in cellular levels of TREM2 comprises a decrease in total levels of TREM2. As used herein, total levels of TREM2 may be measured by any in vitro cell-based assays or suitable in vivo model described herein or known in the art. In some embodiments, the anti-TREM2 antibodies induce TREM2 degradation, TREM2 cleavage, TREM2 internalization, TREM2 shedding, and/or downregulation of TREM2 expression. In some embodiments, cellular levels of TREM2 are measured on primary cells (e.g., dendritic cells, bone marrow-derived dendritic cells, monocytes, microglia, and macrophages) or on cell lines utilizing an in vitro cell assay.

[0459] As disclosed herein, anti-TREM2 antibodies of the present disclosure may also be used for increasing memory and/or reducing cognitive deficit. In some embodiments, the present disclosure provides methods of increasing memory and/or reducing cognitive deficit in an individual in need thereof, by administering to the individual a therapeutically effective amount of an anti-TREM2 antibody of the present disclosure.

[0460] In certain embodiments, the individual has a heterozygous TREM2 variant allele having an glutamic acid to stop codon substitution in the nucleic acid sequence encoding amino acid residue 14 of the human TREM2 protein (SEQ ID NO: 1). In certain embodiments, the individual has a heterozygous TREM2 variant allele having a glutamine to stop codon substitution in the nucleic acid sequence encoding amino acid residue 33 of the human TREM2 protein (SEQ ID NO: 1). In certain embodiments, the individual has a heterozygous TREM2 variant allele having a tryptophan to stop codon substitution in the nucleic acid sequence encoding amino acid residue 44 of the human TREM2 protein (SEQ ID NO: 1). In certain embodiments, the individual has a heterozygous TREM2 variant allele having an arginine to histidine amino acid substitution at amino acid residue 47 of the human TREM2 protein (SEQ ID NO: 1). In certain embodiments, the individual has a heterozygous TREM2 variant allele having a tryptophan to stop codon substitution in the nucleic acid sequence encoding amino acid residue 78 of the human TREM2 protein (SEQ ID NO: 1). In certain embodiments, the individual has a heterozygous TREM2 variant allele having a valine to glycine amino acid substitution at an amino acid corresponding to amino acid residue 126 of the human TREM2 protein (SEQ ID NO: 1). In certain embodiments, the individual has a heterozygous TREM2 variant allele having an aspartic acid to glycine amino acid substitution at an amino acid corresponding to amino acid residue 134 of the human TREM2 protein (SEQ ID NO: 1). In certain embodiments, the individual has a heterozygous TREM2 variant allele having a lysine to asparagine amino acid substitution at an amino acid corresponding to amino acid residue 186 of the human TREM2 protein (SEQ ID NO: 1).

[0461] In some embodiments, the individual has a heterozygous TREM2 variant allele having a guanine nucleotide deletion at a nucleotide corresponding to nucleotide residue G313 of the nucleic acid sequence encoding SEQ ID NO: 1; a guanine nucleotide deletion at a nucleotide corresponding to nucleotide residue G267 of the nucleic acid sequence encoding SEQ ID NO: 1; a threonine to methionine amino acid substitution at an amino acid corresponding to amino acid residue Thr66 of SEQ ID NO: 1; and/or a serine to cysteine amino acid substitution at an amino acid corresponding to amino acid residue Ser116 of SEQ ID NO: 1.

[0462] In some embodiments, the individual has a heterozygous DAP12 variant allele having a methionine to threonine substitution at an amino acid corresponding to amino acid residue Mal of SEQ ID NO: 887, a glycine to arginine amino acid substitution at an amino acid corresponding to amino acid residue Gly49 of SEQ ID NO: 887, a deletion within exons 1-4 of the nucleic acid sequence encoding SEQ ID NO: 887, an insertion of 14 amino acid residues at exon 3 of the nucleic acid sequence encoding SEQ ID NO: 887, and/or a guanine nucleotide deletion at a nucleotide corresponding to nucleotide residue G141 of the nucleic acid sequence encoding SEQ ID NO: 887.

[0463] As disclosed herein, anti-TREM2 antibodies of the present disclosure may also be used for inducing and/or promoting innate immune cell survival. In some embodiments, the present disclosure provides methods of inducing or promoting innate immune cell survival in an individual in need thereof, by administering to the individual a therapeutically effective amount of an agonist anti-TREM2 antibody of the present disclosure.

[0464] As disclosed herein, anti-TREM2 antibodies of the present disclosure may also be used for inducing and/or promoting wound healing, such as after injury. In some embodiments, the wound healing may be colonic wound repair following injury. In some embodiments, the present disclosure provides methods of inducing or promoting wound healing an individual in need thereof, by administering to the individual a therapeutically effective amount of an agonist anti-TREM2 antibody of the present disclosure.

[0465] In some embodiments, the methods of the present disclosure may involve the coadministration of anti-TREM2 antibodies, or bispecific antibodies with TLR antagonists or with agents neutralizing TLR agonist (e.g., neutralizing cytokine or interleukin antibodies).

[0466] In some embodiments, the methods of the present disclosure may involve the administration of chimeric constructs, including an anti-TREM2 antibody of the present disclosure in conjunction with a TREM2 ligand, such as HSP60.

[0467] In some embodiments, the anti-TREM2 antibodies of the present disclosure do not inhibit the growth of one or more innate immune cells. In some embodiments, the anti-TREM2 antibodies of the present disclosure bind to one or more primary immune cells with a K_{D} of less than 50 nM, less than 45 nM, less than 40 nM, less than 35 nM, less than 30 nM, less than 25 nM, less than 20 nM, less than 15 nM, less than 10 nM, less than 9 nM, less than 8 nM, less than 7 nM, less than 6 nM, less than 5 nM, less than 4 nM, less than 3 nM, less than 2 nM, or less than 1 nM. In some embodiments, an anti-TREM2 antibody of the present disclosure accumulates in the brain, or the cerebrospinal fluid (CSF), or both to an extent that is 1% or more, 2% or more, 3% or more, 4% or more, 5% or more, 6% or more, 7% or more, 8% or more, 9% or more, 10% or more of the concentration of the antibody in the blood.

[0468] In some embodiments, a subject or individual is a mammal. Mammals include, without limitation, domesticated animals (e.g., cows, sheep, cats, dogs, and horses), primates (e.g., humans and non-human primates such as monkeys), rabbits, and rodents (e.g., mice and rats). In some embodiments, the subject or individual is a human.

[0469] Dementia

[0470] Dementia is a non-specific syndrome (i.e., a set of signs and symptoms) that presents as a serious loss of global cognitive ability in a previously unimpaired person, beyond what might be expected from normal ageing. Dementia may be static as the result of a unique global brain injury. Alternatively, dementia may be progressive, resulting in long-term decline due to damage or disease in the body. While dementia is much more common in the geriatric population, it can also occur before the age of 65. Cognitive areas affected by dementia include, without limitation, memory, attention span, language, and problem solving. Generally, symptoms must be present for at least six months to before an individual is diagnosed with dementia.

[0471] Exemplary forms of dementia include, without limitation, frontotemporal dementia, Alzheimer's disease, vascular dementia, semantic dementia, and dementia with Lewy bodies.

[0472] In some embodiments, administering an anti-TREM2 antibody of the present disclosure can prevent, reduce the risk, and/or treat dementia. hi some embodiments, administering an anti-TREM2 antibody may induce one or more TREM2 activities in an individual having dementia (e.g., DAP12 phosphorylation, PI3K activation, increased expression of one or more anti-inflammatory mediators, or reduced expression of one or more pro-inflammatory mediators).

[0473] Frontotemporal Dementia

[0474] Frontotemporal dementia (FTD) is a condition resulting from the progressive deterioration of the frontal lobe of the brain. Over time, the degeneration may advance to the temporal lobe. Second only to Alzheimer's disease (AD) in prevalence, FTD accounts for 20% of pre-senile dementia cases. The clinical features of FTD include memory deficits, behavioral abnormalities, personality changes, and language impairments (Cruts, M. & Van Broeckhoven, C., Trends Genet. 24:186-194 (2008); Neary, D., et al., Neurology 51:1546-1554 (1998); Ratnavalli, E., Brayne, C., Dawson, K. & Hodges, J. R., Neurology 58:1615-1621 (2002)).

[0475] A substantial portion of FTD cases are inherited in an autosomal dominant fashion, but even in one family, symptoms can span a spectrum from FTD with behavioral disturbances, to Primary Progressive Aphasia, to Cortico-Basal Ganglionic Degeneration. FTD, like most neurodegenerative diseases, can be characterized by the pathological presence of specific protein aggregates in the diseased brain. Historically, the first descriptions of FTD recognized the presence of intraneuronal accumulations of hyperphosphorylated Tau protein in neurofibrillary tangles or Pick bodies. A causal role for the microtubule associated protein Tau was supported by the identification of mutations in the gene encoding the Tau protein in several families (Hutton, M., et al., Nature 393:702-705 (1998). However, the majority of FTD brains show no accumulation of hyperphosphorylated Tau but do exhibit immunoreactivity to ubiquitin (Ub) and TAR DNA binding protein (TDP43) (Neumann, M., et al., Arch. Neurol. 64:1388-1394 (2007)). A majority of those FTD cases with Ub inclusions (FTD-U) were shown to carry mutations in the progranulin gene.

[0476] In some embodiments, administering an anti-TREM2 antibody of the present disclosure can prevent, reduce the risk, and/or treat FTD. In some embodiments, administering an anti-TREM2 antibody may induce one or more TREM2 activities in an individual having FTD (e.g., DAP12 phosphorylation, PI3K activation, increased expression of one or more anti-inflammatory mediators, or reduced expression of one or more pro-inflammatory mediators).

[0477] Alzheimer's Disease

[0478] Alzheimer's disease (AD) is the most common form of dementia. There is no cure for the disease, which worsens as it progresses, and eventually leads to death. Most often, AD is diagnosed in people over 65 years of age. However, the less-prevalent early-onset Alzheimer's can occur much earlier.

[0479] Common symptoms of Alzheimer's disease include, behavioral symptoms, such as difficulty in remembering recent events; cognitive symptoms, confusion, irritability and aggression, mood swings, trouble with language, and long-term memory loss. As the disease progresses bodily functions are lost, ultimately leading to death. Alzheimer's disease develops for an unknown and variable amount of time before becoming fully apparent, and it can progress undiagnosed for years.

[0480] In some embodiments, administering an anti-TREM2 antibody of the present disclosure can prevent, reduce the risk, and/or treat Alzheimer's disease. In some embodiments, administering an anti-TREM2 antibody may induce one or more TREM2 activities in an individual having Alzheimer's disease (e.g., DAP12 phosphorylation, PI3K activation, increased expression of one or more anti-inflammatory mediators, or reduced expression of one or more pro-inflammatory mediators).

[0481] Nasu-Hakola Disease

[0482] Nasu-Hakola disease (NHD), which may alternatively be referred to as polycystic lipomembranous osteodysplasia with sclerosing leukoencephalopathy (PLOSL), is a rare inherited leukodystrophy characterized by progressive presenile dementia associated with recurrent bone fractures due to polycystic osseous lesions of the lower and upper extremities. NHD disease course is generally divided into four stages: latent, osseous, early neurologic, and late neurologic. After a normal development during childhood (latent stage), NHD starts manifesting during adolescence or young adulthood (typical age of onset 20-30 years) with pain in the hands, wrists, ankles, and feet. Patients then start suffering from recurrent bone fractures due to polycystic osseous and osteroporotic lesions in the limb bones (osseous stage). During the third or fourth decade of life (early neurologic stage), patients present with pronounced personality changes (e.g., euphoria, lack of concentration, loss of judgment, and social inhibitions) characteristic of a frontal lobe syndrome. Patients also typically suffer from progressive memory disturbances. Epileptic seizures are also frequently observed. Finally (late neurologic stage), patients progress to a profound dementia, are unable to speak and move, and usually die by the age of 50.

[0483] In some embodiments, administering an anti-TREM2 antibody of the present disclosure can prevent, reduce the risk, and/or treat Nasu-Hakola disease (NHD). In some embodiments, administering an anti-TREM2 antibody may induce one or more TREM2 activities in an individual having NHD (e.g., DAP12 phosphorylation, PI3K activation, increased expression of one or more anti-inflammatory mediators, or reduced expression of one or more pro-inflammatory mediators).

[0484] Parkinson's Disease

[0485] Parkinson's disease, which may be referred to as idiopathic or primary parkinsonism, hypokinetic rigid syndrome (HRS), or paralysis agitans, is a neurodegenerative brain disorder that affects motor system control. The progressive death of dopamine-producing cells in the brain leads to the major symptoms of Parkinson's. Most often, Parkinson's disease is diagnosed in people over 50 years of age. Parkinson's disease is idiopathic (having no known cause) in most people. However, genetic factors also play a role in the disease.

[0486] Symptoms of Parkinson's disease include, without limitation, tremors of the hands, arms, legs, jaw, and face, muscle rigidity in the limbs and trunk, slowness of movement (bradykinesia), postural instability, difficulty walking, neuropsychiatric problems, changes in speech or behavior, depression, anxiety, pain, psychosis, dementia, hallucinations, and sleep problems.

[0487] In some embodiments, administering an anti-TREM2 antibody of the present disclosure can prevent, reduce the risk, and/or treat Parkinson's disease. In some embodiments, administering an anti-TREM2 antibody may induce one or more TREM2 activities in an individual having Parkinson's disease (e.g., DAP12 phosphorylation, PI3K activation, increased expression of one or more anti-inflammatory mediators, or reduced expression of one or more pro-inflammatory mediators).

[0488] Amyotrophic Lateral Sclerosis

[0489] As used herein, amyotrophic lateral sclerosis (ALS) or, motor neuron disease or, Lou Gehrig's disease are used interchangeably and refer to a debilitating disease with varied etiology characterized by rapidly progressive weakness, muscle atrophy and fasciculations, muscle spasticity, difficulty speaking (dysarthria), difficulty swallowing (dysphagia), and difficulty breathing (dyspnea).

[0490] It has been shown that progranulin play a role in ALS (Schymick, J C et al., (2007) J Neurol Neurosurg Psychiatry.; 78:754-6) and protects again the damage caused by ALS causing proteins such as TDP-43 (Laird, A S et al., (2010). PLoS ONE 5: e13368). It was also demonstrated that pro-NGF induces p75 mediated death of oligodendrocytes and corticospinal neurons following spinal cord injury (Beatty et al., Neuron (2002), 36, pp. 375-386; Giehl et al, Proc. Natl. Acad. Sci USA (2004), 101, pp 6226-30).

[0491] In some embodiments, administering an anti-TREM2 antibody of the present disclosure can prevent, reduce the risk, and/or treat ALS. In some embodiments, administering an anti-TREM2 antibody may induce one or more TREM2 activities in an individual having ALS (e.g., DAP12 phosphorylation, PI3K activation, increased expression of one or more anti-inflammatory mediators, or reduced expression of one or more pro-inflammatory mediators).

[0492] Huntington's Disease

[0493] Huntington's disease (HD) is an inherited neurodegenerative disease caused by an autosomal dominant mutation in the Huntingtin gene (HTT). Expansion of a cytokine-adenine-guanine (CAG) triplet repeat within the Huntingtin gene results in production of a mutant form of the Huntingtin protein (Htt) encoded by the gene. This mutant Huntingtin protein (mHtt) is toxic and contributes to neuronal death. Symptoms of Huntington's disease most commonly appear between the ages of 35 and 44, although they can appear at any age.

[0494] Symptoms of Huntington's disease, include, without limitation, motor control problems, jerky, random movements (chorea), abnormal eye movements, impaired balance, seizures, difficulty chewing, difficulty swallowing, cognitive problems, altered speech, memory deficits, thinking difficulties, insomnia, fatigue, dementia, changes in personality, depression, anxiety, and compulsive behavior.

[0495] In some embodiments, administering an anti-TREM2 antibody of the present disclosure can prevent, reduce the risk, and/or treat Huntington's disease (HD). In some embodiments, administering an anti-TREM2 antibody may induce one or more TREM2 activities in an individual having HD (e.g., DAP12 phosphorylation, PI3K activation, increased expression of one or more anti-inflammatory mediators, or reduced expression of one or more pro-inflammatory mediators).

[0496] Tauopathy Disease

[0497] Tauopathy diseases, or Tauopathies, are a class of neurodegenerative disease caused by aggregation of the microtubule-associated protein tau within the brain. Alzheimer's disease (AD) is the most well-known tauopathy disease, and involves an accumulation of tau protein within neurons in the form of insoluble neurofibrillary tangles (NFTs). Other tauopathy diseases and disorders include progressive supranuclear palsy, dementia pugilistica (chromic traumatic encephalopathy), Frontotemporal dementia and parkinsonism linked to chromosome 17, Lytico-Bodig disease (Parkinson-dementia complex of Guam), Tangle-predominant dementia, Ganglioglioma and gangliocytoma, Meningioangiomatosis, Subacute sclerosing panencephalitis, lead encephalopathy, tuberous sclerosis, Hallervorden-Spatz disease, lipofuscinosis, Pick's disease, corticobasal degeneration, Argyrophilic grain disease (AGD), Huntington's disease, frontotemporal dementia, and frontotemporal lobar degeneration.

[0498] In some embodiments, administering an anti-TREM2 antibody of the present disclosure can prevent, reduce the risk, and/or treat tauopathy disease. In some embodiments, administering an anti-TREM2 antibody may induce one or more TREM2 activities in an individual having tauopathy disease (e.g., DAP12 phosphorylation, PI3K activation, increased expression of one or more anti-inflammatory mediators, or reduced expression of one or more pro-inflammatory mediators).

[0499] Multiple Sclerosis

[0500] Multiple sclerosis (MS) can also be referred to as disseminated sclerosis or encephalomyelitis disseminata. MS is an inflammatory disease in which the fatty myelin sheaths around the axons of the brain and spinal cord are damaged, leading to demyelination and scarring as well as a broad spectrum of signs and symptoms. MS affects the ability of nerve cells in the brain and spinal cord to communicate with each other effectively. Nerve cells communicate by sending electrical signals called action potentials down long fibers called axons, which are contained within an insulating substance called myelin. In MS, the body's own immune system attacks and damages the myelin. When myelin is lost, the axons can no longer effectively conduct signals. MS onset usually occurs in young adults, and is more common in women.

[0501] Symptoms of MS include, without limitation, changes in sensation, such as loss of sensitivity or tingling; pricking or numbness, such as hypoesthesia and paresthesia; muscle weakness; clonus; muscle spasms; difficulty in moving; difficulties with coordination and balance, such as ataxia; problems in speech, such as dysarthria, or in swallowing, such as dysphagia; visual problems, such as nystagmus, optic neuritis including phosphenes, and diplopia; fatigue; acute or chronic pain; and bladder and bowel difficulties; cognitive impairment of varying degrees; emotional symptoms of depression or unstable mood; Uhthoffs phenomenon, which is an exacerbation of extant symptoms due to an exposure to higher than usual ambient temperatures; and Lhermitte's sign, which is an electrical sensation that runs down the back when bending the neck.

[0502] In some embodiments, administering an anti-TREM2 antibody of the present disclosure can prevent, reduce the risk, and/or treat multiple sclerosis. In some embodiments, administering an anti-TREM2 antibody may induce one or more TREM2 activities in an individual having multiple sclerosis (e.g., DAP12 phosphorylation, PI3K activation, increased expression of one or more anti-inflammatory mediators, and reduced expression of one or more pro-inflammatory mediators).

[0503] Cancer

[0504] Yet further aspects of the present disclosure provide methods for preventing, reducing risk, or treating an individual having cancer, comprising administering to the individual a therapeutically effective amount of an isolated anti-TREM2 antibody of the present disclosure. Any of the isolated antibodies of the present disclosure may be used in these methods. In some embodiments, the isolated antibody is an agonist antibody of the present disclosure. In other embodiments, the isolated antibody is an antagonist antibody of the present disclosure.

[0505] As described above, the tumor microenvironment is known to contain a heterogeneous immune infiltrate, which includes T lymphocytes, macrophages and cells of myeloid/granulocytic lineage. In particular, the presence of M2-macrophages in tumors is associated with poor prognosis. Therapies that reduce the number of these cells in the tumor, such as CSF-1R blocking agents, are showing beneficial effects in preclinical models and early stage clinical studies. It has been shown that TREM2 synergizes with CSF-1 to promote survival of macrophages in vitro, and that this effect is particularly prominent in M2-type macrophages, compared to other types of phagocytic cells. A seminal preclinical study has also shown synergies between drugs that target tumor-associated macrophages (e.g., CSF-1/CSF-1R blocking antibodies) and checkpoint blocking antibodies that target T cells, indicating that manipulating both cell types shows efficacy in tumor models where individual therapies are poorly effective (Zhu Y; Cancer Res. 2014 Sep. 15; 74(18):5057-69). Therefore, without wishing to be bound by theory, it is thought that blocking TREM2 signaling in tumor associated macrophages may inhibit suppression of the immune response in the tumor microenvironment, resulting in a therapeutic anti-tumor immune response.

[0506] Due to the synergies between TREM2 and CSF-1, and between targeting tumor-associated macrophages and targeting T cells, in some embodiments, the methods for preventing, reducing risk, or treating an individual having cancer further include administering to the individual at least one antibody that specifically binds to an inhibitory checkpoint molecule. Examples of antibodies that specifically bind to an inhibitory checkpoint molecule include, without limitation, an anti-PD-L1 antibody, an anti-CTLA-4 antibody, an anti-PD-L2 antibody, an anti-PD-1 antibody, an anti-B7-H3 antibody, an anti-B7-H4 antibody, and anti-HVEM antibody, an anti-BTLA antibody, an anti-GALS antibody, an anti-TIM3 antibody, an anti-AZAR antibody, an anti-LAG-3 antibody, an anti-phosphatidylserine antibody, and any combination thereof. In some embodiments, the at least one antibody that specifically binds to an inhibitory checkpoint molecule is administered in combination with an antagonist anti-TREM2 antibody of the present disclosure.

[0507] In some embodiments, a cancer to be prevented or treated by the methods of the present disclosure includes, but is not limited to, squamous cell cancer (e.g., epithelial squamous cell cancer), lung cancer including small-cell lung cancer, non-small cell lung cancer, adenocarcinoma of the lung and squamous carcinoma of the lung, cancer of the peritoneum, hepatocellular cancer, gastric or stomach cancer including gastrointestinal cancer and gastrointestinal stromal cancer, pancreatic cancer, glioblastoma, cervical cancer, ovarian cancer, liver cancer, bladder cancer, cancer of the urinary tract, hepatoma, breast cancer, colon cancer, rectal cancer, colorectal cancer, endometrial or uterine carcinoma, salivary gland carcinoma, kidney or renal cancer, prostate cancer, vulval cancer, thyroid cancer, hepatic carcinoma, anal carcinoma, penile carcinoma, melanoma, superficial spreading melanoma, lentigo maligna melanoma, acral lentiginous melanomas, nodular melanomas, multiple myeloma and B-cell lymphoma; chronic lymphocytic leukemia (CLL); acute lymphoblastic leukemia (ALL); hairy cell leukemia; chronic myeloblastic leukemia; and post-transplant lymphoproliferative disorder (PTLD), as well as abnormal vascular proliferation associated with phakomatoses, edema (such as that associated with brain tumors), Meigs' syndrome, brain, as well as head and neck cancer, and associated metastases. In some embodiments, the cancer is colorectal cancer. In some embodiments, the cancer is selected from non-small cell lung cancer, glioblastoma, neuroblastoma, renal cell carcinoma, bladder cancer, ovarian cancer, melanoma, breast carcinoma, gastric cancer, and hepatocellular carcinoma. In some embodiments, the cancer is triple-negative breast carcinoma. In some embodiments, the cancer may be an early stage cancer or a late stage cancer. In some embodiments, the cancer may be a primary tumor. In some embodiments, the cancer may be a metastatic tumor at a second site derived from any of the above types of cancer.

[0508] In some embodiments, anti-TREM2 antibodies of the present disclosure may be used for preventing, reducing risk, or treating cancer, including, without limitation, bladder cancer breast cancer, colon and rectal cancer, endometrial cancer, kidney cancer, renal cell cancer, renal pelvis cancer, leukemia, lung cancer, melanoma, non-Hodgkin's lymphoma, pancreatic cancer, prostate cancer, ovarian cancer, fibrosarcoma, and thyroid cancer.

[0509] In some embodiments, the present disclosure provides methods of preventing, reducing risk, or treating an individual having cancer, by administering to the individual a therapeutically effective amount of an anti-TREM2 antibody of the present disclosure.

[0510] In some embodiments, the method further includes administering to the individual at least one antibody that specifically binds to an inhibitory checkpoint molecule, and/or another standard or investigational anti-cancer therapy. In some embodiments, the at least one antibody that specifically binds to an inhibitory checkpoint molecule is administered in combination with the isolated antibody. In some embodiments, the at least one antibody that specifically binds to an inhibitory checkpoint molecule is selected from an anti-PD-L1 antibody, an anti-CTLA-4 antibody, an anti-PD-L2 antibody, an anti-PD-1 antibody, an anti-B7-H3 antibody, an anti-B7-H4 antibody, and anti-HVEM antibody, an anti-B- and T-lymphocyte attenuator (BTLA) antibody, an anti-Killer inhibitory receptor (KIR) antibody, an anti-GALS antibody, an anti-TIM3 antibody, an anti-AZAR antibody, an anti-LAG-3 antibody, an anti-phosphatidylserine antibody, an anti-CD27 antibody, and any combination thereof. In some embodiments, the standard or investigational anti-cancer therapy is one or more therapies selected from radiotherapy, cytotoxic chemotherapy, targeted therapy, imatinib (Gleevec®), trastuzumab (Herceptin®), adoptive cell transfer (ACT), chimeric antigen receptor T cell transfer (CAR-T), vaccine therapy, hormonal therapy, bevacizumab (Avastin®), Ofatumumab (Arzerra®), Rituximab (Rituxan®, MabThera®, Zytux®), cryotherapy, ablation, radiofrequency ablation, and cytokine therapy.

[0511] In some embodiments, the method further includes administering to the individual at least one antibody that specifically binds to an inhibitory cytokine. In some embodiments, the at least one antibody that specifically binds to an inhibitory cytokine is administered in combination with the isolated antibody. In some embodiments, the at least one antibody that specifically binds to an inhibitory cytokine is selected from an anti-CCL2 antibody, an anti-CSF-1 antibody, an anti-IL-2 antibody, and any combination thereof.

[0512] In some embodiments, the method further includes administering to the individual at least one agonistic antibody that specifically binds to a stimulatory checkpoint protein. In some embodiments, the at least one agonistic antibody that specifically binds to a stimulatory checkpoint protein is administered in combination with the isolated antibody. In some embodiments, the at least one agonistic antibody that specifically binds to a stimulatory checkpoint protein is selected from an agonist anti-CD40 antibody, an agonist anti-0X40 antibody, an agonist anti-ICOS antibody, an agonist anti-CD28 antibody, an agonist anti-CD137/4-1BB antibody, an agonist anti-CD27 antibody, an agonist anti-glucocorticoid-induced TNFR-related protein GITR antibody, and any combination thereof.

[0513] In some embodiments, the method further includes administering to the individual at least one stimulatory cytokine. In some embodiments, the at least one stimulatory cytokine is administered in combination with the isolated antibody. In some embodiments, the at least one stimulatory cytokine is selected from TNF-α, IL-1α, IL-1β, IL-10, IL-6, IL-8, CRP, TGF-beta members of the chemokine protein families, IL-20 family members, IL-33, LIF, IFN-gamma, OSM, CNTF, TGF-beta, IL-11, IL-12, IL-17, IL-8, CRP, IFN-α, IFN-β, IL-2, IL-18, IL-23, CXCL10, CCL4, MCP-1, VEGF, GM-CSF, G-CSF, and any combination thereof.

[0514] Kits/Articles of Manufacture

[0515] The present disclosure also provides kits containing an isolated antibody of the present disclosure (e.g., an anti-TREM2 or anti-DAP12 antibody described herein), or a functional fragment thereof. Kits of the present disclosure may include one or more containers comprising a purified antibody of the present disclosure. In some embodiments, the kits further include instructions for use in accordance with the methods of this disclosure. In some embodiments, these instructions comprise a description of administration of the isolated antibody of the present disclosure (e.g., an anti-TREM2 or anti-DAP12 antibody described herein) to prevent, reduce risk, or treat an individual having a disease, disorder, or injury selected from dementia, frontotemporal dementia, Alzheimer's disease, Nasu-Hakola disease, multiple sclerosis, and cancer, according to any methods of this disclosure.

[0516] In some embodiments, the instructions comprise a description of how to detect TREM2 and/or DAP12, for example in an individual, in a tissue sample, or in a cell. The kit may further comprise a description of selecting an individual suitable for treatment based on identifying whether that individual has the disease and the stage of the disease.

[0517] In some embodiments, the kits may further include another antibody of the present disclosure (e.g., at least one antibody that specifically binds to an inhibitory checkpoint molecule, at least one antibody that specifically binds to an inhibitory cytokine, and/or at least one agonistic antibody that specifically binds to a stimulatory checkpoint protein) and/or at least one stimulatory cytokine. In some embodiments, the kits may further include instructions for using the antibody and/or stimulatory cytokine in combination with an isolated antibody of the present disclosure (e.g., an anti-TREM2 antagonist antibody described herein), instructions for using the isolated antibody of the present disclosure in combination with an antibody and/or stimulatory cytokine, or instructions for using an isolated antibody of the present disclosure and an antibody and/or stimulatory cytokine, according to any methods of this disclosure.

[0518] The instructions generally include information as to dosage, dosing schedule, and route of administration for the intended treatment. The containers may be unit doses, bulk packages (e.g., multi-dose packages) or sub-unit doses. Instructions supplied in the kits of the present disclosure are typically written instructions on a label or package insert (e.g., a paper sheet included in the kit), but machine-readable instructions (e.g., instructions carried on a magnetic or optical storage disk) are also acceptable.

[0519] The label or package insert indicates that the composition is used for treating, e.g., a disease of the present disclosure. Instructions may be provided for practicing any of the methods described herein.

[0520] The kits of this disclosure are in suitable packaging. Suitable packaging includes, but is not limited to, vials, bottles, jars, flexible packaging (e.g., sealed Mylar or plastic bags), and the like. Also contemplated are packages for use in combination with a specific device, such as an inhaler, nasal administration device (e.g., an atomizer) or an infusion device such as a minipump. A kit may have a sterile access port (for example the container may be an intravenous solution bag or a vial having a stopper pierceable by a hypodermic injection needle). The container may also have a sterile access port (e.g., the container may be an intravenous solution bag or a vial having a stopper pierceable by a hypodermic injection needle). At least one active agent in the composition is an isolated antibody of the present disclosure (e.g., an anti-TREM2 or anti-DAP12 antibody described herein). The container may further comprise a second pharmaceutically active agent.

[0521] Kits may optionally provide additional components such as buffers and interpretive information. Normally, the kit comprises a container and a label or package insert(s) on or associated with the container.

### Diagnostic Uses

[0522] The isolated antibodies of the present disclosure (e.g., an anti-TREM2 or anti-DAP12 antibody described herein) also have diagnostic utility. This disclosure therefore provides for methods of using the antibodies of this disclosure, or functional fragments thereof, for diagnostic purposes, such as the detection of TREM2 and/or DAP12 in an individual or in tissue samples derived from an individual.

[0523] In some embodiments, the individual is a human. In some embodiments, the individual is a human patient suffering from, or at risk for developing, cancer. In some embodiments, the diagnostic methods involve detecting TREM2 and/or DAP12 in a biological sample, such as a biopsy specimen, a tissue, or a cell. An isolated antibody of the present disclosure (e.g., an anti-TREM2 or anti-DAP12 antibody described herein) is contacted with the biological sample and antigen-bound antibody is detected. For example, a tumor sample (e.g., a biopsy specimen) may be stained with an anti-TREM2 or anti-DAP12 antibody described herein in order to detect and/or quantify tumor-associated macrophages (e.g., M2-type macrophages). The detection method may involve quantification of the antigen-bound antibody. Antibody detection in biological samples may occur with any method known in the art, including immunofluorescence microscopy, immunocytochemistry, immunohistochemistry, ELISA, FACS analysis, immunoprecipitation, or micro-positron emission tomography. In certain embodiments, the antibody is radiolabeled, for example with ¹⁸F and subsequently detected utilizing micro-positron emission tomography analysis. Antibody-binding may also be quantified in a patient by non-invasive techniques such as positron emission tomography (PET), X-ray computed tomography, single-photon emission computed tomography (SPECT), computed tomography (CT), and computed axial tomography (CAT).

[0524] In other embodiments, an isolated antibody of the present disclosure (e.g., an anti-TREM2 or anti-DAP12 antibody described herein) may be used to detect and/or quantify, for example, microglia in a brain specimen taken from a preclinical disease model (e.g., a non-human disease model). As such, an isolated antibody of the present disclosure (e.g., an anti-TREM2 or anti-DAP12 antibody described herein) may be useful in evaluating therapeutic response after treatment in a model for a nervous system disease or injury such as dementia, frontotemporal dementia, Alzheimer's disease, Nasu-Hakola disease, or multiple sclerosis, as compared to a control.

[0525] The present disclosure will be more fully understood by reference to the following Examples. They should not, however, be construed as limiting the scope of the present disclosure. All citations throughout the disclosure are hereby expressly incorporated by reference.

### EXAMPLES

### Example 1: Production, Identification, and Characterization of Agonist Anti-TREM2 Antibodies

### Introduction

[0526] The amino acid sequence of the human TREM2 preprotein is set forth below in SEQ ID NO: 1. Human TREM2 contains a signal peptide located at amino residues 1-18 of SEQ ID NO: 1. Human TREM2 contains an extracellular immunoglobulin-like variable-type (IgV) domain located at amino residues 29-112 of SEQ ID NO: 1; additional extracellular sequences located at amino residues 113-174 of SEQ ID NO: 1; a transmembrane domain located at amino residues 175-195 of SEQ ID NO: 1; and an intracellular domain located at amino residues 196-230 of SEQ ID NO: 1.

[0527] TREM2 amino acid sequence (SEQ ID NO: 1):

```
                10 20 30 40
MEPLRLLILL FVTELSGAHN TTVFQGVAGQ SLQVSCPYDS
                50 60 70 80
MKHWGRRKAW CRQLGEKGPC QRVVSTHNLW LLSFLRRWNG
                90 100 110 120
STAITDDTLG GTLTITLRNL QPHDAGLYQC QSLHGSEADT
              130 140 150 160
LRKVLVEVLA DPLDHRDAGD LWFPGESESF EDAHVEHSIS
              170 180 190 200
RSLLEGEIPF PPTSILLLLA CIFLIKILAA SALWAAAWHG
              210 220 230
QKPGTHPPSE LDCGHDPGYQ LQTLPGLRDT
```

[0528] A known feature of human TREM2 is that the transmembrane domain contains a lysine (aa186) that can interact with an aspartic acid in DAP12, a key adaptor protein that transduces signaling from TREM2, TREM1, and other related IgV family members.

[0529] A BLAST analysis of human TREM2 identified 18 related homologues. These homologues included the Natural Killer (NK) cell receptor NK-p44 (NCTR2), the polymeric immunoglobulin receptor (pIgR), CD300E, CD300A, CD300C, and TREML1/TLT1. The closest homologue was identified as NCTR2, having similarity with TREM2 within the IgV domain (FIG. 1A). A BLAST analysis also compared TREM proteins with other IgV family proteins (FIG. 1B).

[0530] TREM2 is also related to TREM1. An alignment of the amino acid sequences of TREM1 and TREM2 was generated by 2-way blast (FIG. 2). This is limited to the IgV domain as well.

[0531] Antibodies that bind the extracellular domain of TREM2, particularly the extra cellular domain (amino acid residues 19-174 of SEQ ID NO: 1) are generated using mouse hybridoma technology, phage display technology, and yeast display technology. Antibodies are then screened for their ability to bind cells that express TREM2 and for their ability to activate TREM2 signaling and functions in cells and in a whole animal in vivo as described in Examples 2-48 below. For example, agonist anti-TREM2 antibodies can be produced that target the IgV domain (amino acid residues 29-112). IgV domains bind to targets, and through multimerization of receptors, lead to activation. Thus these domains are rational targets for agonistic antibodies. They are also highly divergent.

### Results

[0532] Anti-TREM2 Antibody Production

[0533] Immunization Procedure

[0534] Rapid Prime Method:

[0535] Four 50-day old female BALB/c mice were immunized with using the following procedure. A series of subcutaneous aqueous injections containing human TREM2 antigen but no adjuvant were given over a period of 19 days. Mice were housed in a ventilated rack system from Lab Products. All four mice were euthanized on Day 19 and lymphocytes were harvested for hybridoma cell line generation.

[0536] Standard Method:

[0537] Four 50-day old female BALB/c mice, NZB/W mice, or Trem2tml (KOMP)Vlcg mice were immunized using the following procedure. Mice were housed in a ventilated rack system from Lab Products. Mice were injected intraperitoneally every 3 weeks with a human TREM2 antigen mixed in CpG-ODN adjuvant at 25 μg protein antigen per mouse (total volume 125 μL, per mouse). Test bleeds were done by saphenous vein lancing seven days after the second boost. The test bleed (immune sera) was tested by indirect ELISA assay to determine the best two responding mice for the fusion. The mice may require a 3rd and 4th boost and another test bleed 7 days after boost to assess titer before fusion. When the antibody titer is high enough the best two responding mice are given a final intravenous boost via lateral tail vein. Four days after the IV boost the mice were euthanized for fusion. The spleens were harvested and lymphocytes isolated from the spleen were used in the fusion process to produce hybridomas.

[0538] HTV Method

[0539] Ten female Trem2tml (KOMP)Vlcg mice were immunized using the following procedure according to Bates et al., Biotechniques 2006, 40 (2): 199-208 and Hazen et al., Landes Bioscience 2014, 6:1, 95-107. Mice were housed in a ventilated rack system from Lab Products. Endotoxin free recombinant DNA constructs were produced by BlueSky Technologies. Human Trem2-Dap12 fusion protein was subcloned into the pCAGGS-Kan plasmid and pUNO-mGMCSF and pUNO-mF1t3La plasmids were purchased from Kerafast. Plasmid DNA in PBS was diluted in warm Ringer's solution to 10% of the mice body weight and transferred to a 3 ml syringe with 29G needle. For the hydrodynamic tail vein injection (HTV), mice were lightly anesthesized with Isoflurane on a heat pad and DNA was bolus injected into the lateral tail vein over 6-10 seconds. Mice were allowed to recover for 2 minutes on the heat pad and observed for any acute effects for 10 minutes after injection. Mice were boosted up to five times weekly. Immune response was assessed by test bleeding the mice 5 days post 4^{th} boost using indirect Elisa on Trem2 antigen. Mice with the best IgG titer will be used for hybridoma development.

[0540] Hybridoma Development

[0541] Lymphocytes were isolated and fused with murine SP2/0 myeloma cells in the presence of poly-ethylene glycol (PEG 1500) as per standard Roche Protocol. Fused cells were cultured using a single-step cloning method (HAT selection). This method uses a semi-solid methylcellulose-based HAT selective medium to combine the hybridoma selection and cloning into one step. Single cell-derived hybridomas grow to form monoclonal colonies on the semi-solid media. Ten days after the fusion event, 948 of the resulting hybridoma clones were transferred to 96-well tissue culture plates and grown in HT containing medium until mid-log growth was reached (5 days).

[0542] Hybridoma Screening

[0543] Tissue culture supernatants from the 948 hybridomas were tested by indirect ELISA on screening antigen (Primary Screening) and probed for both IgG and IgM antibodies using a Goat anti-IgG/IgM(H&L)-HRP secondary and developed with TMB substrate. Clones >0.2 OD in this assay were taken to the next round of testing. Positive cultures were retested on screening antigen to confirm secretion and on an irrelevant antigen (Human Transferrin) to eliminate non-specific or “sticky” mAbs and rule out false positives. All clones of interest were isotyped by antibody trapping ELISA to determine if they are IgG or IgM isotype.

[0544] Hybridoma Cell Culture

[0545] The hybridoma cell lines of interest were maintained in culture in 24-well culture plates for 32 days post transfer to 96-well plates. This is referred to as the stability period and tests whether clones remain stable and secreting. During this stability period time temporary frozen cell line back up is made of all the clones of interest for −80° C. storage (viable 6 months). Hybridomas were periodically tested during this time period for secretion and specificity.

[0546] Subcloning

[0547] The top hybridoma cell lines (clones) were subcloned to ensure monoclonality. Subcloning was performed by plating parental clones out again using the single-step cloning system. Between 24 and 90 subclones were transferred to 96-well culture plates. Subclones were screened by indirect ELISA and antibody trapping ELISA. The top subclones for each parent were taken for expansion in culture. Any parental clones that were <50% clonal had a second round of subcloning performed.

[0548] The antibodies were then screened for TREM2 binding. Antibodies that were positive for binding to human TREM2 were tested for ability to block ligand binding and ability to induce, enhance, or otherwise increase ligand-induced TREM2 activity in multiple cell types. The isotype and bin category of each of the antibodies are listed in Table 1. In Table 1, “ND” refers to antibodies for which the Bin category has not been determined.

TABLE 1
Anti-TREM2 antibodies

| Ab ID | Ab Isotype | Bin |
|---|---|---|
| 1A7 | mIgG1 | 3 |
| 3A2 | mIgG1 | 1 |
| 3B10 | mIgG1 | 4 |
| 6G12 | mIgG1 | 1 |
| 6H6 | mIgG2b | 1 |
| 7A9 | mIgG1 | ND |
| 7B3 | mIgG1 | 4 |
| 8A1 | mIgG2a | 3 |
| 8E10 | mIgG1 | 2-3 |
| 8F11 | mIgG1 | 2 |
| 8F8 | mIgG1 | 4 |
| 9F5 | mIgG1 | ND |
| 9G1 | mIgG1 | 4 |
| 9G3 | mIgG1 | 4 |
| 10A9 | mIgG1 | 1 |
| 10C1 | mIgG2b | 1 |
| 11A8 | mIgG1 | 4 |
| 12E2 | mIgG1 | 4 |
| 12F9 | mIgG1 | 4 |
| 12G6 | mIgG1 | ND |
| 2C7 | mIgG1 | 4 |
| 2F5 | mIgG1 | |
| 3C1 | mIgG1 | 4 |
| 4D7 | mIgG1 | 4 |
| 4D11 | mIgG1 | 4 |
| 6C11 | mIgG1 | 4 |
| 6G12 | mIgG1 | ND |
| 7A3 | mIgG1 | 4 |
| 7C5 | mIgG1 | 4 |
| 7E9 | mIgG1 | 4 |
| 7F6 | mIgG1 | 4 |
| 7G1 | mIgG1 | 4 |
| 7H1 | mIgG1 | ND |
| 8C3 | mIgG1 | 4 |
| 8F10 | mIgG1 | ND |
| 12A1 | mIgG1 | 4 |
| 1E9 | mIgG2b | 4 |
| 2C5 | mIgG2b | 1/4 |
| 3C5 | mIgG2b | 4 |
| 4C12 | mIgG2b | 4 |
| 4F2 | mIgG2b | 4 |
| 5A2 | mIgG2a | 4 |
| 6B3 | mIgG2a | 1 |
| 7D1 | mIgG2a | 4 |
| 7D9 | mIgG2b | 4 |
| 11D8 | mIgG2b | 4 |
| 8A12 | mIgG1 | 3 |
| 10E7 | mIgG1 | ND |
| 10B11 | mIgG2a | ND |
| 10D2 | mIgG2b | ND |
| 7D5 | mIgG2a | ND |
| 2A7 | mIgG2a | ND |
| 3G12 | mIgG1 | ND |
| 6H9 | mIgG2a | ND |
| 8G9 | mIgG2a | ND |
| 9B4 | mIgG2a | ND |
| 10A1 | mIgG1 | ND |
| 11A8 | mIgG2a | ND |
| 12F3 | mIgG2a | ND |
| 1H7 | mIgG1 | 1 |
| 2F6 | mIgG1 | 4 |
| 2H8 | mIgG1 | 1 |
| 3A7 | mIgG1 | 4 |
| 7E5 | mIgG1 | 4 |
| 7F8 | mIgG1 | 1 |
| 11H5 | mIgG1 | 4 |
| 1B4 | mIgG2a | 4 |
| 6H2 | mIgG2a | ND |
| 7B11 | mIgG2a | 4 |
| 18D8 | mIgG2a | 1 |
| 18E4 | mIgG2a | ND |
| 29F6 | mIgG1 | 4 |
| 40D5 | mIgG2a | ND |
| 43B9 | mIgG2a | 4 |
| 44A8 | mIgG2a | ND |
| 44B4 | mIgG1 | ND |
| 45D6 | mIgG2a | 4 |
| 29F7 | mIgG2a | ND |
| 32G1 | mIgG2a | 4 |

[0549] Antibody Heavy Chain and Light Chain Variable Domain Sequences

[0550] Using standard techniques, the amino acid sequences encoding the light chain variable and the heavy chain variable domains of the generated antibodies were determined. The EU or Kabat light chain HVR sequences of the antibodies are set forth in Table 2A. The EU or Kabat light chain HVR consensus sequences of the antibodies are set forth in Table 2B. The EU or Kabat heavy chain HVR sequences of the antibodies are set forth in Table 3A. The EU or Kabat heavy chain HVR consensus sequences of the antibodies are set forth in Table 3B. The EU or Kabat light chain framework (FR) sequences of the antibodies are set forth in Table 4A. The EU or Kabat heavy chain framework (FR) sequences of the antibodies are set forth in Table 4B. The EU or Kabat heavy chain HVR

TABLE 2A
EU or Kabat light chain HVR sequences

| Ab | HVR L1 | HVR L2 | HVR L3 |
|---|---|---|---|
| 4D11 | RASENIYSFLA (SEQ ID | NSKTFAE (SEQ ID | QHHYGTPPWT (SEQ ID NO: 34) |
| | NO: 9) | NO: 24) | |
| 78C5 | RASENIYSFLA (SEQ ID | NSKTFAE (SEQ ID | QHHYGTPPWT (SEQ ID NO: 34) |
| | NO: 9) | NO: 24) | |
| 6G12 | KSSQSLLYSSNQKNCLA | WAFTRES (SEQ ID | QQYYSYPLT (SEQ ID NO: 35) |
| | (SEQ ID NO: 10) | NO: 25) | |
| 8F11 | KSSQSLLYSNGKTFLS (SEQ | LVSKLDS (SEQ ID | MQGTHFPLT (SEQ ID NO: 36) |
| | ID NO: 11) | NO: 26) | |
| 8E10 | KSSQSLLDSDGKTYLN | LVSKLDS (SEQ ID | WQGTHFPYT (SEQ ID NO: 37) |
| | (SEQ ID NO: 12) | NO: 26) | |
| 7E5 | KSSQSLLYSNGKTFLS (SEQ | LVSKLDS (SEQ ID | MQGTHFPLT (SEQ ID NO: 36) |
| | ID NO: 11) | NO: 26) | |
| 7F8 | SASSSVSYMY (SEQ ID | LTSILAS (SEQ ID NO: 27) | QQWSFNPYT (SEQ ID NO: 38) |
| | NO: 13) | | |
| 8F8 | RSSQSLVHSNGNTYLH | KVSNRFS (SEQ ID | SQSTHVPLT (SEQ ID NO: 39) |
| | (SEQ ID NO: 14) | NO: 28) | |
| 1H7 | SASSSVSYMY (SEQ ID | LTSILAS (SEQ ID NO: 27) | QQWSFNPYT (SEQ ID NO: 38) |
| | NO: 13) | | |
| 2H8 | SASSSVSYMY (SEQ ID | LTSILAS (SEQ ID NO: 27) | QQWSFNPYT (SEQ ID NO: 38) |
| | NO: 13) | | |
| 3A2 | RSSQTIIHSNGNTYLE (SEQ | KVSNRFS (SEQ ID | FQGSHVPYT (SEQ ID NO: 40) |
| | ID NO: 15) | NO: 28) | |
| 3A7 | KSSQSLLYSNGKTFLS (SEQ | LVSKLDS (SEQ ID | MQGTHFPLT (SEQ ID NO: 36) |
| | ID NO: 11) | NO: 26) | |
| 3B10 | KSSQSLLYSSDQKNYLA | WASTRES (SEQ ID | QQYYSYPLT (SEQ ID NO: 35) |
| | (SEQ ID NO: 16) | NO: 29) | |
| 4F11 | RSSQTIIHSNGNTYLE (SEQ | KVSNRFS (SEQ ID | FQGSHVPYT (SEQ ID NO: 40) |
| | ID NO: 15) | NO: 28) | |
| 6H6 | KSSQSVFYSSNQKNYLA | WASTRES (SEQ ID | HQYLSSLT (SEQ ID NO: 582) |
| | (SEQ ID NO: 581) | NO: 29) | |
| 7A9 | RASENIYSYLA (SEQ ID | KAKTLAE (SEQ ID | QHHYGTPFT (SEQ ID NO: 41) |
| | NO: 17) | NO: 30) | |
| 8A1 | RTSENVYSNLA (SEQ ID | AATNLAD (SEQ ID | HHFWGTPYT (SEQ ID NO: 42) |
| | NO: 18) | NO: 31) | |
| 9E5 | RSSQSLVHSNGYTYLH | KVSNRFS (SEQ ID | SQSTRVPYT (SEQ ID NO: 43) |
| | (SEQ ID NO: 19) | NO: 28) | |
| 9G1 | RFSQSLVHSNGNTYLH | KVSNRFS (SEQ ID | SQSTRVPPT (SEQ ID NO: 44) |
| | (SEQ ID NO: 20) | NO: 28) | |
| 9G3 | KASSNVNYMS (SEQ ID | FTSNLPS (SEQ ID NO: 32) | SGEVTQFT (SEQ ID NO: 45) |
| | NO: 21) | | |
| 10A9 | RSSQTIIHSNGNTYLE (SEQ | KVSNRFC (SEQ ID | FQGSHVPYT (SEQ ID NO: 40) |
| | ID NO: 15) | NO: 33) | |
| 11A8 | KSSQSLLNSGNQKKYLT | WASTRES (SEQ ID | QNDYGFPLT (SEQ ID NO: 46) |
| | (SEQ ID NO: 22) | NO: 29) | |
| 12D9 | KSSQSLLYSGNQKNFLA | WASTRES (SEQ ID | QQYYSYPFT (SEQ ID NO: 47) |
| | (SEQ ID NO: 23) | NO: 29) | |
| 12E9 | KSSQSLLYSSDQKNYLA | WASTRES (SEQ ID | QQYYSYPLT (SEQ ID NO: 35) |
| | (SEQ ID NO: 16) | NO: 29) | |
| 10C1 | KSSQSVFYSSNQKNYLA | WASTRES (SEQ ID | HQYLSSLT (SEQ ID NO: 582) |
| | (SEQ ID NO: 581 | NO: 29) | |
| 7E9 | KSSQSLLYSSNQKNCLA | WASTRES (SEQ ID | QQYYSYPLT (SEQ ID NO: 35) |
| | (SEQ ID NO: 10) | NO: 29) | |
| 8C3 | RSSQSLVHSNGNTYLH | KVSNRFS (SEQ ID | SQSTHVPPT (SEQ ID NO: 583) |
| | (SEQ ID NO: 14) | NO: 28) | |
| 1B4v1 | SQDVSTTVA (SEQ ID | SASYRYT (SEQ ID | QQHYSTPPT (SEQ ID NO: 698) |
| | NO: 690) | NO: 695) | |
| 1B4v2 | SQSLVHSNGNTYLH (SEQ | KVSNRVS (SEQ ID | SQSTHVPLT (SEQ ID NO: 39) |
| | ID NO: 734) | NO: 739) | |
| 6H2 | SQSIVHSNGNTYLE (SEQ ID | KVSNRFS (SEQ ID | FQGSHVPFT (SEQ ID NO: 699) |
| | NO: 691) | NO: 28) | |
| 7B11 | SQGVSTAVA (SEQ ID | WASTRHT (SEQ ID | HQHYSTYT (SEQ ID NO: 700) |
| | NO: 692) | NO: 696) | |
| 18D8 | SQDVRTAVA (SEQ ID | SASYRYT (SEQ ID | QQHYGTPPWT (SEQ ID |
| | NO: 693) | NO: 695) | NO: 701) |
| 18E4v1 | SENVVTYVS (SEQ ID | GASNRYT (SEQ ID | GQGYSYPYT (SEQ ID NO: 702) |
| | NO: 694) | NO: 697) | |
| 18E4v2 | SQSLVHSNGNTYLH (SEQ | KVSDRFS (SEQ ID | SQSTHVPLT (SEQ ID NO: 39) |
| | ID NO: 734) | NO: 740) | |
| 29F6v1 | SQDVRTAVA (SEQ ID | SASYRYT (SEQ ID | QQHYGTPPWT (SEQ ID |
| | NO: 693) | NO: 695) | NO: 701) |
| 29F6v2 | SQSLVHSNGDTYLH (SEQ | KVSNRFS (SEQ ID | SQSTHVPLT (SEQ ID NO: 39) |
| | ID NO: 735) | NO: 28) | |
| 40D5 | SQDVRTAVA (SEQ ID | SASYRYT (SEQ ID | QQHYGTPPWT (SEQ ID |
| | NO: 693) | NO: 695) | NO: 701) |
| 43B9 | SQDVRTAVA (SEQ ID | SASYRYT (SEQ ID | QQHYGTPPWT (SEQ ID |
| | NO: 693) | NO: 695) | NO: 701) |
| 44A8v1 | SQDVSTTVA (SEQ ID | SASYRYT (SEQ ID | QQHYSTPPT (SEQ ID NO: 698) |
| | NO: 690) | NO: 695) | |
| 44A8v2 | SESVDYHGTSLMQ (SEQ ID | AASNVES (SEQ ID | QQNRKILWT (SEQ ID NO: 744) |
| | NO: 736) | NO: 741) | |
| 44B4v1 | SQDVRTAVA (SEQ ID | SASYRYT (SEQ ID | QQHYGTPPWT (SEQ ID |
| | NO: 693) | NO: 695) | NO: 701) |
| 44B4v2 | SENIZYSLA (SEQ ID | NANSLED (SEQ ID | KQAYDVPWT (SEQ ID NO: 745) |
| | NO: 737) | NO: 742) | |
| 29F7 | RASQSIGTSIH (SEQ ID | FASESIS (SEQ ID NO: 743) | QQTNTWPIT (SEQ ID NO: 746) |
| | NO: 738) | | |
| 32G1 | RSSQSLVHSNGNTYLH | KVSNRFS (SEQ ID | SQSTHVPLT (SEQ ID NO: 39) |
| | (SEQ ID NO: 14) | NO: 28) | |

TABLE 2B
EU or Kabat light chain HVR consensus sequences

| | HVR Ll |
|---|---|
| Consensus 1 | RXSENXYSXLA (SEQ ID NO: 826) |
| Consensus 2 | RSSQXXXHSNGXTYLX (SEQ ID NO: 827) |
| Consensus 3 | KSSQSXXXSXXQKXXLX (SEQ ID NO: 828) |

TABLE 3A
EU or Kabat heavy chain HVR sequences

| Ab ID | HVR H1 | HVR H2 | HVR H3 |
|---|---|---|---|
| 4D11 | FTLSSYAMS | VASISRGGSTYYP (SEQ ID NO: 66) | TRGYGYYRTPFAN (SEQ ID |
| | (SEQ ID NO: 48) | | NO: 85) |
| 78C5 | FTLSSYAMS | VASISRGGSTYYP (SEQ ID NO: 66) | TRGYGYYRTPFAN (SEQ ID |
| | (SEQ ID NO: 48) | | NO: 85) |
| 6G12 | YTFTEYTMH | IGGINPNNGGTSYS (SEQ ID NO: 67) | ARGGSHYYAMDY (SEQ ID |
| | (SEQ ID NO: 49) | | NO: 86) |
| 8E10 | YTFTDYEMH | IGVIDPETGGTAYN (SEQ ID NO: 68) | TSPDYYGSSYPLYYAMDY (SEQ |
| | (SEQ ID NO: 50) | | ID NO: 87) |
| 7E5 | FTFSDAWMG | VAEIRDKVKNHATYYA (SEQ ID | RLGVFDY (SEQ ID NO: 88) |
| | (SEQ ID NO: 51) | NO: 69) | |
| 7F8 | FSFNTYAMN | IARIRSKSNNYATYYA (SEQ ID | VRHGDGNLWYIDV (SEQ ID |
| | (SEQ ID NO: 52) | NO: 70) | NO: 89) |
| 8F8 | YTVSRYWMH | IGRIDPNSGGTKYN (SEQ ID NO: 71) | VLTGTDFDY (SEQ ID NO: 90) |
| | (SEQ ID NO: 53) | | |
| 1H7 | FSFNTYAMN | IARIRSKSNNYATYYA (SEQ ID | VRHGDGNLWYIDV (SEQ ID |
| | (SEQ ID NO: 52) | NO: 70) | NO: 89) |
| 2H8 | FSFNTYAMN | IARIRSKSNNYATYYA (SEQ ID | VRHGDGNLWYIDV (SEQ ID |
| | (SEQ ID NO: 52) | NO: 70) | NO: 89) |
| 3A2 | YPFSNFWIT | IGDIYPGSDNSNYN (SEQ ID NO: 72) | AREAYYTNPGFAY (SEQ ID |
| | (SEQ ID NO: 54) | | NO: 91) |
| 3A7 | FTFSDAWMG | VAEIRDKVKNHATYYA (SEQ ID | RLGVFDY (SEQ ID NO: 88) |
| | (SEQ ID NO: 51) | NO: 69) | |
| 3B10 | LTSNTYTQT | ESVIRSKSNNFSTLYA (SEQ ID | VRHKSNRYPGVY (SEQ ID |
| | (SEQ ID NO: 55) | NO: 73) | NO: 92) |
| 4F11 | YPFSNFWIT | IGDIYPGSDNSNYN (SEQ ID NO: 72) | AREAYYTNPGFAY (SEQ ID |
| | (SEQ ID NO: 54) | | NO: 91) |
| 6H6 | FTFSDAWMD | VAEIRNKVNNHATYYA (SEQ ID | TSLYDGYYLRFAY (SEQ ID |
| | (SEQ ID NO: 56) | NO: 74) | NO: 93) |
| 7A9 | FTFNTYSMN | VAHIKTKZNNFATFYA (SEQ ID | VZHZSNNYPFAY (SEQ ID |
| | (SEQ ID NO: 57) | NO: 75) | NO: 94) |
| 7B3 | YTFTTYWIH | IGRNDPNSGGSNYN (SEQ ID NO: 76) | VRTNWDGDF (SEQ ID NO: 95) |
| | (SEQ ID NO: 58) | | |
| 8A1 | YAFSNYWMS | IGQIYPGDGDTKYN (SEQ ID NO: 77) | SREKGADYYGSTYSAWFSY |
| | (SEQ ID NO: 59) | | (SEQ ID NO: 96) |
| 9F5 | YAFSSSWMN | IGRIYPGDGDTNYN (SEQ ID NO: 78) | ARLLRNQPGESYAMDY (SEQ ID |
| | (SEQ ID NO: 60) | | NO: 97) |
| 9F5a | YAFSSSWMN | RIYPGDGDTNYNGEFRV (SEQ ID | ARLLRNQPGESYAMDY (SEQ ID |
| | (SEQ ID NO: 60) | NO: 888) | NO: 97) |
| 9G1 | YIFTTYWIH | IGRIDPNNGDTNYN (SEQ ID NO: 79) | VMTGTDFDY (SEQ ID NO: 98) |
| | (SEQ ID NO: 61) | | |
| 9G3 | FNFNTYAMK | IARIRSNSNDYATNYS (SEQ ID | VGHKINNYPFAH (SEQ ID |
| | (SEQ ID NO: 62) | NO: 80) | NO: 99) |
| 10A9 | YPFSNFWIT | IGDIYPGSDNRNFN (SEQ ID NO: 81) | AREAYYTNPGFAY (SEQ ID |
| | (SEQ ID NO: 54) | | NO: 91) |
| 11A8 | FNFNTYAMN | VARIRSKSNNYATYYA (SEQ ID | VRHYSNYGWGFAY (SEQ ID |
| | (SEQ ID NO: 63) | NO: 82) | NO: 100) |
| 12D9 | YTFSDYYIH | IGYIYPNNGDNGYN (SEQ ID NO: 83) | ARRGYYGGSYDY (SEQ ID |
| | (SEQ ID NO: 64) | | NO: 101) |
| 12F9 | FRFNTYAMT | EGVIRRKSSNFATLYA (SEQ ID | VRHKSNKYPFVY (SEQ ID |
| | (SEQ ID NO: 65) | NO: 84) | NO: 102) |
| 10C1 | FTFSDAWMD | VAEIRNKINNHATYYA (SEQ ID | TSLYDGSYLRFAY (SEQ ID |
| | (SEQ ID NO: 56) | NO: 585) | NO: 588) |
| 7E9 | YTFTEYTMH | IGGINPNNGGTSYK (SEQ ID | ARGGSHYYAMDY (SEQ ID |
| | (SEQ ID NO: 49) | NO: 586) | NO: 86) |
| 8C3 | YSFTGYYMH | IGRVNPNNGGTSYN (SEQ ID | VLTGGYFDY (SEQ ID NO: 589) |
| | (SEQ ID NO: 584) | NO: 587) | |
| 1B4 | SRFTFSSYAMS | VAAISGGGRYTYYP (SEQ ID | ARHYDGYLDY (SEQ ID NO: 709) |
| | (SEQ ID NO: 703) | NO: 706) | |
| 6H2 | SAFSLTNYAVH | LGVIWSGGSTAFN (SEQ ID NO: 707) | ATHYYRSTYAFSY (SEQ ID |
| | (SEQ ID NO: 704) | | NO: 710) |
| 7B11v1 | SRFTFSSYAMS | VAAISGGGRYTYYP (SEQ ID | ARHYDGYLDY (SEQ ID NO: 709) |
| | (SEQ ID NO: 703) | NO: 706) | |
| 7B11v2 | SGYTFTDFYMN | IGDINPNNGHTTYN (SEQ ID | AREPYSYGSSPWYFLV (SEQ ID |
| | (SEQ ID NO: 747) | NO: 755) | NO: 763) |
| 18D8 | SRFTFSSYAMS | VAAISGGGRYTYYP (SEQ ID | ARHYDGYLDY (SEQ ID NO: 709) |
| | (SEQ ID NO: 703) | NO: 706) | |
| 18E4v1 | SRFTFSSYAVS | VATISGGGRYTYYP (SEQ ID | ARHYDGYLDY (SEQ ID NO: 709) |
| | (SEQ ID NO: 705) | NO: 708) | |
| 18E4v2 | SGYTFTAYWMH | IGRTHPSDSDTNYN (SEQ ID | ATYSNYVTGAMDS (SEQ ID |
| | (SEQ ID NO: 748) | NO: 756) | NO: 764) |
| 29F6v1 | SRFTFSSYAMS | VAAISGGGRYTYYP (SEQ ID | ARHYDGYLDY (SEQ ID NO: 709) |
| | (SEQ ID NO: 703) | NO: 706) | |
| 29F6v2 | SGFNIKNTYIH | IGRIDPAIGNTNYA (SEQ ID NO: 757) | VSPGMDY (SEQ ID NO: 765) |
| | (SEQ ID NO: 749) | | |
| 40D5v1 | SRFTFSSYAMS | VAAISGGGRYTYYP (SEQ ID | ARHYDGYLDY (SEQ ID NO: 709) |
| | (SEQ ID NO: 703) | NO: 706) | |
| 40D5v2 | SGYTFTNYWIH | IGRIHPSDSDINYN (SEQ ID NO: 758) | VKTGTSFAS (SEQ ID NO: 766) |
| | (SEQ ID NO: 750) | | |
| 43B9 | SRFTFSSYAMS | VAAISGGGRYTYYP (SEQ ID | ARHYDGYLDY (SEQ ID NO: 709) |
| | (SEQ ID NO: 703) | NO: 706) | |
| 44A8 | SRFTFSSYAMS | VAAISGGGRYTYYP (SEQ ID | ARHYDGYLDY (SEQ ID NO: 709) |
| | (SEQ ID NO: 703) | NO: 706) | |
| 44B4v1 | SRFTFSSYAMS | VAAISGGGRYTYYP (SEQ ID | ARHYDGYLDY (SEQ ID NO: 709) |
| | (SEQ ID NO: 703) | NO: 706) | |
| 44B4v2 | SGYTFTSATMH | IGYINPNSGYSKYN (SEQ ID NO: 759) | ARWGIDGNYGGGFEDV (SEQ |
| | (SEQ ID NO: 751) | | ID NO: 767) |
| 45D6 | YSFTDYNIH | IGYINPNSDNTRYI (SEQ ID NO: 760) | TRGFSNLGAMDY (SEQ ID |
| | (SEQ ID NO: 752) | | NO: 768) |
| 29F7 | FTLSNYWMN | VAQIRLKSDNYATHYA (SEQ ID | TGAGGNHENY (SEQ ID NO: 769) |
| | (SEQ ID NO: 753) | NO: 761) | |
| 32G1 | YTFTDYNIH | IGYINPNNGGTTYN (SEQ ID | ATTYVSFSY (SEQ ID NO: 770) |
| | (SEQ ID NO: 754) | NO: 762) | |

TABLE 3B
EU or Kabat heavy chain HVR consensus sequences

| | HVR H1 | HVR H2 |
|---|---|---|
| Consensus 1 | YX₁X₂X₃XYXXH | IGXXXPX₁X₂X₃X₄X₅XYX₆ |
| | X₁ is T or S | X₁ is N or E |
| | X₂ is F or V | X₂ is N, S, or T |
| | X₃ is T ot S | X₃ is G or D |
| | (SEQ ID NO: 829) | X₄ is G, D, or N |
| | | X₅ is T, S, or N |
| | | X₆ is N, S, K, or I |
| | | (SEQ ID NO: 836) |
| Consensus 2 | YTFTXYXXH | IGXXXPNNGGTXYN |
| | (SEQ ID NO: 830) | (SEQ ID NO: 837) |
| Consensus 3 | EITSDAWMX₁ | VAEIRX₁KX₂X₃NHATYYA |
| | X₁ is D or G | X₁ is N or D |
| | (SEQ ID NO: 831) | X₂ is V or I |
| | | X₃ is N or K |
| | | (SEQ ID NO: 838) |
| Consensus 4 | FXX₁X₂X₃YX₄MX₅ | XX₁XIX₂X₃X₄X₅X₆X₇X₈ATXYX₉ |
| | X₁ is F or L | X₁ is A or G |
| | X₂ is N or S | X₂ is R or K |
| | X₃ is T or N | X₃ is S, T, R, or L |
| | X₄ is A, S, or W | X₄ is K or N |
| | X₅ is N, K, or T | X₅ is S, E, or Q |
| | (SEQ ID NO: 832) | X₆ is N, S, or D |
| | | X₇ is N or D |
| | | X₈ is Y or F |
| | | X₉ is A or S |
| | | (SEQ ID NO: 839) |
| Consensus 5 | FXFNTYAMN | XAXIRSKSNNYATXYA |
| | (SEQ ID NO: 833) | (SEQ ID NO: 840) |
| Consensus 6 | YXFX₁X₂XVVX₃X | IGXIX₁PX₂XX₃X₄X₅X₆X₇N |
| | X₁ is S or T | X₁ is Y or D |
| | X₂ is N, S, or T | X₂ is G or N |
| | X₃ is I or M | X₃ is G or D |
| | (SEQ ID NO: 834) | X₄ is N or D |
| | | X₅ is T, R, or S |
| | | X₆ is N or K |
| | | X₇ is Y or F |
| | | (SEQ ID NO: 841) |
| Consensus 7 | YXFSNXWIX | IGXIYPGXGDTNYN |
| | (SEQ ID NO: 835) | (SEQ ID NO: 842) |

TABLE 4A
EU or Kabat light chain Framework sequences

| Ab ID | VL FR1 | VL FR2 | VL FR3 | VL FR4 |
|---|---|---|---|---|
| 4D11 | DIZVTQSPASLSA | WYQLKQGKSPQLLV | GVPSRFSGSGSGTQFS | FGGGTKLEIK (SEQ |
| | SVGETVTITC | Y (SEQ ID NO: 120) | LRINSLQPEDEGSYYC | ID NO: 148) |
| | (SEQ ID NO: 103) | | (SEQ ID NO: 130) | |
| 78C5 | DIZVTQSPASLSA | WYQLKQGKSPQLLV | GVPSRFSGSGSGTQFS | FGGGTKLEIK (SEQ |
| | SVGETVTITC | Y (SEQ ID NO: 120) | LRINSLQPEDEGSYYC | ID NO: 148) |
| | (SEQ ID NO: 103) | | (SEQ ID NO: 130) | |
| 6G12 | TMSQSPSSLAVS | WYQQKPGQSPKLLIY | GVPDRFTGSGSGTDFT | FGAGTKLELK |
| | VGEKVTMSC | (SEQ ID NO: 121) | LTISSVKAEDLAVYYC | (SEQ ID NO: 149) |
| | (SEQ ID NO: 104) | | (SEQ ID NO: 131) | |
| 8F11 | DVZMTQTPLTLS | WLLQRPGQSPKRLIY | GVPDRFAGSGSGTDFT | FGAGTKLELK |
| | VTIGQPASISC | (SEQ ID NO: 122) | LKISRLEADDLGIYYC | (SEQ ID NO: 149) |
| | (SEQ ID NO: 105) | | (SEQ ID NO: 132) | |
| 8E10 | DVZMTQTPLTLS | WLLQRPGQSPKRLIY | GVPDRFTGSGSGTDFT | FGGGTKLEIK (SEQ |
| | VTIGQPASISC | (SEQ ID NO: 122) | LKISRVEAEDLGVYYC | ID NO: 148) |
| | (SEQ ID NO: 105) | | (SEQ ID NO: 133) | |
| 7E5 | DVZMTQTPLTLS | WLLQRPGQSPKRLIY | GVPDRFAGSGSGTDFT | FGAGTKLELK |
| | VTIGQPASISC | (SEQ ID NO: 122) | LKISRLEADDLGIYYC | (SEQ ID NO: 149) |
| | (SEQ ID NO: 105) | | (SEQ ID NO: 132) | |
| 7E5v2 | DVVMTQTPLTLS | WLLQRPGQSPKRLIY | GVPDRFAGSGSGTDFT | FGAGTKLELK |
| | VTIGQPASISC | (SEQ ID NO: 122) | LKISRLEADDLGIYYC | (SEQ ID NO: 149) |
| | (SEQ ID NO: 111) | | (SEQ ID NO: 132) | |
| 7F8 | VLTQSPALMSAS | WYQQKPRSSPKPWIY | GVPARFSGSGSGTSYS | FGGGTKLVIK |
| | PGEKVTMTC | (SEQ ID NO: 123) | LTINNMEAEDAATYY | (SEQ ID NO: 150) |
| | (SEQ ID NO: 106) | | C (SEQ ID NO: 134) | |
| 8F8 | DVZMTQTPLSLP | WYLQKPGQSPKLLIY | GVPDRFSGSGSGTDFT | FGAGTKLELK |
| | VSLGDQASISC | (SEQ ID NO: 124) | LKISRVEAEDLGVYFC | (SEQ ID NO: 149) |
| | (SEQ ID NO: 107) | | (SEQ ID NO: 135) | |
| 1H7 | VLTQSPAIMZASP | WYQQKPRSSPKPWIY | GVPARFSGSGSGTSYS | FGGGTKLVIK |
| | GEKVTMTC (SEQ | (SEQ ID NO: 123) | LTISSMEAEDAATYYC | (SEQ ID NO: 150) |
| | ID NO: 108) | | (SEQ ID NO: 136) | |
| 2H8 | NVLTQSPALMSA | WYQQKPRSSPKPWIY | GVPARFSGSGSGTSYS | FGGGTKLVIK |
| | SPGEKVTMTC | (SEQ ID NO: 123) | LTISSMEAEDAATYYC | (SEQ ID NO: 150) |
| | (SEQ ID NO: 109) | | (SEQ ID NO: 136) | |
| 3A2 | DVVMTQTPLSLP | WYLRKPGQSPKLLIY | GVPDRFSGSGSGTDFT | FGGGTELEIK (SEQ |
| | VSLGDQASISC | (SEQ ID NO: 125) | LKISRVEAEDLGVYYC | ID NO: 151) |
| | (SEQ ID NO: 110) | | (SEQ ID NO: 137) | |
| 3A7 | DVVMTQTPLTLS | WLLQRPGQSPKRLIY | GVPDRFAGSGSGTDFT | FGGGTKLEMK |
| | VTIGQPASISC | (SEQ ID NO: 122) | ZKISRLEADDLGIYYC | (SEQ ID NO: 152) |
| | (SEQ ID NO: 111) | | (SEQ ID NO: 138) | |
| 3B10 | ITMSQSPSSLAVS | WYQQKPGQSPKLLIY | GVPDRFTGSGSGTDFT | FGAGTKLELK |
| | VGEKVTMSC | (SEQ ID NO: 121) | LTISSVKAEDLAVYCC | (SEQ ID NO: 149) |
| | (SEQ ID NO: 112) | | (SEQ ID NO: 139) | |
| 4F11 | DVZMTQTPLSLP | WYLRKPGQSPKLLIY | GVPDRFSGSGSGTDFT | FGGGTELEIK (SEQ |
| | VSLGDQASISC | (SEQ ID NO: 125) | LKISRVEGEDLGVYYC | ID NO: 151) |
| | (SEQ ID NO: 107) | | (SEQ ID NO: 140) | |
| 6H6 | QTQSPSSLAVSA | WYQQKPGQSPKLLIS | GVPDRFTGSGFGTDFT | FGAGTKLELK |
| | GEKVTLSC (SEQ | (SEQ ID NO: 593) | LTISSVQGEDLAVYYC | (SEQ ID NO: 149) |
| | ID NO: 590) | | (SEQ ID NO: 594) | |
| 7A9 | QMSQSPACLZAZ | WYQQKQGKSPKLVV | GVPSRFSGRGSGTQFF | FGSGTKLEIK (SEQ |
| | VGESVTITC (SEQ | Y (SEQ ID NO: 126) | LKINSZQREDFGSYYC | ID NO: 153) |
| | ID NO: 113) | | (SEQ ID NO: 141) | |
| 8A1 | DIQMTQSPASLSV | WYQQKQGKSPQLLV | GVPSRFSASGSATQFS | FGGGTKLEMN |
| | SVGETVTITC | Y (SEQ ID NO: 127) | LKINSLQSADFGSYYC | (SEQ ID NO: 154) |
| | (SEQ ID NO: 114) | | (SEQ ID NO: 142) | |
| 9F5 | DVZMTQNPLSLP | WYLQKPGQSPKLLIY | GVPDRFSGSGSGTDFT | FGGGTKLEIK (SEQ |
| | VSLGDQASISC | (SEQ ID NO: 124) | LKISRVEADDLGVYLC | ID NO: 148) |
| | (SEQ ID NO: 115) | | (SEQ ID NO: 143) | |
| 9F5v2 | DVVMTQTPLSLP | WYLQKPGQSPKLLIY | GVPDRFSGSGSGTDFT | FGGGTKLEIK (SEQ |
| | VSLGDQASISC | (SEQ ID NO: 124) | LKISRVEADDLGVYFC | ID NO: 148) |
| | (SEQ ID NO: 110) | | (SEQ ID NO: 848) | |
| 9G1 | DVLMTQTPLSLP | WYLQKPGQSPKLLIY | GVPDRFSGSGSGTDFT | FGGGTKLEIK (SEQ |
| | VSLGDQASISC | (SEQ ID NO: 124) | LRISGVEAEDLGVYFC | ID NO: 148) |
| | (SEQ ID NO: 116) | | (SEQ ID NO: 144) | |
| 9G3 | NVLTQSPALIWA | WXXXKPRSSPKPGIY | GVPGRFSGSGSGTYXS | FGGGTKLEMK |
| | ZPGEKVTMTC | (SEQ ID NO: 128) | FKISSMEGKMGPLIIFC | (SEQ ID NO: 155) |
| | (SEQ ID NO: 117) | | (SEQ ID NO: 145) | |
| 10A9 | DVVMTQTPLSLP | WYLRKPGQSPKLLIY | GVPDRFSGSGSGTDFT | FGGGTELEIK (SEQ |
| | VSLGDQASISC | (SEQ ID NO: 125) | LKISRVEAEDLGVYYC | ID NO: 151) |
| | (SEQ ID NO: 110) | | (SEQ ID NO: 137) | |
| 11A8 | DIZMTQSPSSLTV | WYQQKPGQPZKLLIY | GVRDRFTGSGZGTDFT | FGGGTKLEMK |
| | TAGEKVTMSC | (SEQ ID NO: 129) | LTISSVQGEDLAIYYC | (SEQ ID NO: 152) |
| | (SEQ ID NO: 118) | | (SEQ ID NO: 146) | |
| 12D9 | TQSPSSLAVSVGE | WYQQKPGQSPKLLIY | GVPDRFTGSGSGTDFT | FGSGTKLEIK (SEQ |
| | KVTMTC (SEQ ID | (SEQ ID NO: 121) | LTISTVKAEDLAVYYC | ID NO: 153) |
| | NO: 119) | | (SEQ ID NO: 147) | |
| 12F9 | TMSQSPSSLAVS | WYQQKPGQSPKLLIY | GVPDRFTGSGSGTDFT | FGAGTKLELK |
| | VGEKVTMSC | (SEQ ID NO: 121) | LTISSVKAEDLAVYCC | (SEQ ID NO: 149) |
| | (SEQ ID NO: 104) | | (SEQ ID NO: 139) | |
| 10C1 | QTQVFLSLLLWV | WYQQKPGQSPKLLIS | GVPDRFTGSGSGTDFT | FGAGTKLELK |
| | SGTCGNIMLTQSP | (SEQ ID NO: 593) | LTINSVQAEDLAVYYC | (SEQ ID NO: 149) |
| | SSLAVSAGEKVT | | (SEQ ID NO: 595) | |
| | LSC (SEQ ID | | | |
| | NO: 591) | | | |
| 7E9 | DIVMSQSPSSLAV | WYQQKPGQSPKLLIY | GVPDRFTGSGSGTDFT | FGAGTKLELK |
| | SVGEKVTMSC | (SEQ ID NO: 121) | LTISSVKAEDLAVYYC | (SEQ ID NO: 149) |
| | (SEQ ID NO: 592) | | (SEQ ID NO: 131) | |
| 8C3 | DVVMTQTPLSLP | WYLQKPGQSPKLLIY | GVPDRFSGSGSGTDFT | FGSGTKLEIK (SEQ |
| | VSLGDQASISC | (SEQ ID NO: 124) | LKISRVEAEDLGVYFC | ID NO: 153) |
| | (SEQ ID NO: 110) | | (SEQ ID NO: 135) | |
| 1B4v1 | DIVMTQSHKFMS | WYQQKPGQSPKLLIY | GVPDRFTGSGFGTDFT | FGGGTKLEIK (SEQ |
| | TSVGDRVSITCK | (SEQ ID NO: 121) | FTISSVQAEDLAVYYC | ID NO: 148) |
| | A (SEQ ID | | (SEQ ID NO: 715) | |
| | NO: 711) | | | |
| 1B4v2 | ZVVZTQTPLSLPV | WFLQKPGQSPKLLIF | GVPDRFSGSGSGTDFT | FGAGTKLELK |
| | SLGDQASFSCRS | (SEQ ID NO: 777) | LKISRVEAEDLGVYFC | (SEQ ID NO: 149) |
| | (SEQ ID NO: 771) | | (SEQ ID NO: 135) | |
| 6H2 | DVLMTQTPLSLP | WYLQKPGQSPKLLIY | GVPDRFSGSGSGTDFT | FGSGTKLEIK (SEQ |
| | VSLGDQASISCRS | (SEQ ID NO: 124) | LKISRVEAEDLGVYYC | ID NO: 153) |
| | (SEQ ID NO: 712) | | (SEQ ID NO: 137) | |
| 7B11 | DIVMTQSHKFMS | WYQQKPGQSPKLLIY | GVPDRFTGSGSGTDYT | FGGGTKLEIK (SEQ |
| | TSVGDRVSITCK | (SEQ ID NO: 121) | LTISSVQAEDLALYYC | ID NO: 148) |
| | A (SEQ ID | | (SEQ ID NO: 716) | |
| | NO: 711) | | | |
| 18D8 | DIVMTQSHKFMS | WYQQKPGQSPKLLIY | GVPDRFTGSGFGTDFT | FGGGTKLEIK (SEQ |
| | TSIGARVSITCKA | (SEQ ID NO: 121) | FTISSVQAEDLAVYYC | ID NO: 148) |
| | (SEQ ID NO: 713) | | (SEQ ID NO: 715) | |
| 18E4v1 | DIVMTQSPKSMS | WYQQKPEQSPKLLIY | GVPDRFTGSGSATDFT | FGGGTKLEIK (SEQ |
| | MSVGERVTLTCK | (SEQ ID NO: 714) | LTISSVQAEDLADYHC | ID NO: 148) |
| | A (SEQ ID | | (SEQ ID NO: 717) | |
| | NO: 714) | | | |
| 18E4v2 | NIVMTQSPKSMS | WYQQKPEQSPKLLIY | GVPDRFTGSGSATDFT | FGGGTKLEIK (SEQ |
| | MSVGERVTLTCK | (SEQ ID NO: 714) | LTISSVQAEDLADYHC | ID NO: 148) |
| | A (SEQ ID | | (SEQ ID NO: 717) | |
| | NO: 772) | | | |
| 18E4v3 | DVVMTQTPLSLP | WYLQKPGQSPKLLIY | GVPDRFSGSGSGTDFT | FGAGTKLELK |
| | VSLGDQASISCRS | (SEQ ID NO: 124) | LRISRVEAEDLGVYFC | (SEQ ID NO: 149) |
| | (SEQ ID NO: 773) | | (SEQ ID NO: 781) | |
| 29F6v1 | DIVMTQSHKFMS | WYQQKPGQSPKLLIY | GVPDRFTGSGSGTDFT | FGGGTKLEIK (SEQ |
| | TSIGARVSITCKA | (SEQ ID NO: 121) | FTISSVQAEDLAVYYC | ID NO: 148) |
| | (SEQ ID NO: 713) | | (SEQ ID NO: 718) | |
| 29F6v2 | DVVMTQTPLSLP | WYLQKPGQSPKLLIY | GVPDRFSGSGSGTDFT | FGAGTKLELK |
| | VSLGDQASISCRS | (SEQ ID NO: 124) | LKISRVEAEDLGVYFC | (SEQ ID NO: 149) |
| | (SEQ ID NO: 773) | | (SEQ ID NO: 135) | |
| 40D5 | DIVMTQSHKFMS | WYQQKPGQSPKLLIY | GVPDRFTGSGSGTDFT | FGGGTKLEIK (SEQ |
| | TSIGARVSITCKA | (SEQ ID NO: 121) | FTISSVQAEDLAVYYC | ID NO: 148) |
| | (SEQ ID NO: 713) | | (SEQ ID NO: 718) | |
| 43B9 | DIVMTQSHKFMS | WYQQKPGQSPKLLIY | GVPDRFTGSGSGTDFT | FGGGTKLEIK (SEQ |
| | TSIGARVSITCKA | (SEQ ID NO: 121) | FTISSVQAEDLAVYYC | ID NO: 148) |
| | (SEQ ID NO: 713) | | (SEQ ID NO: 718) | |
| 44A8v1 | IDIVMTQSHKFMS | WYQQKPGQSPKLLIY | GVPDRFTGSGSGTDFT | FGGGTKLEIK (SEQ |
| | TSVGDRVSITCK | (SEQ ID NO: 121) | FTISSVQAEDLAVYYC | ID NO: 148) |
| | A (SEQ ID | | (SEQ ID NO: 718) | |
| | NO: 711) | | | |
| 4418v2 | DIVLTQSPASLAV | WYQQKPGQPPKLLIY | GVPARFSGSGSGTDFS | FGGGTKLEIK (SEQ |
| | SLGQRATISCRA | (SEQ ID NO: 778) | LNIHPVEEDDIAMYFC | ID NO: 148) |
| | (SEQ ID NO: 774) | | (SEQ ID NO: 782) | |
| 44B4v1 | DIVMTQSHKFMS | WYQQKPGQSPKLLIY | GVPDRFTGSGSGTDFT | FGGGTKLEIK (SEQ |
| | TSIGARVSITCKA | (SEQ ID NO: 121) | FTISSVQAEDLAVYYC | ID NO: 148) |
| | (SEQ ID NO: 713) | | (SEQ ID NO: 718) | |
| 44B4v2 | DIQMTQFPASLA | WYQQKQGKSPQLLIY | GVPSRFSGSGSGTQYS | FGGGTKLEIK (SEQ |
| | AZVGESVTITCRA | (SEQ ID NO: 779) | MKINSMQPEDTAIYFC | ID NO: 148) |
| | (SEQ ID NO: 775) | | (SEQ ID NO: 783) | |
| 29F7 | ILLTQSPAILSVSP | WYQQRTNGSPRLLIK | GIPSRFSGSGSGTDFTL | FGAGTKLELK |
| | GERVSFSC | (SEQ ID NO: 780) | NINSVESEDIADYYC | (SEQ ID NO: 149) |
| | (SEQ ID NO: 776) | | (SEQ ID NO: 784) | |
| 32G1 | DVVMTQTPLSLP | WYLQKPGQSPKLLIY | GVPDRFSGSGSGTDFT | FGAGTKLELK |
| | VSLGDQASISC | (SEQ ID NO: 124) | LKISRVEAEDLGVYFC | (SEQ ID NO: 149) |
| | (SEQ ID NO: 110) | | (SEQ ID NO: 135) | |

TABLE 4B
EU or Kabat heavy chain Framework sequences

| Ab ID | VH FR1 | VH FR2 | VH FR3 | VH FR4 |
|---|---|---|---|---|
| 4D11 | EVKLVESGGGLVK | WVRQTPEKRLEW | DSVQGRFTFSRDNARN | WGQGTLVTVSA |
| | PGGSLKLSCAASG | (SEQ ID NO: 175) | ILYLQMSSLRSEDTAM | (SEQ ID NO: 209) |
| | (SEQ ID NO: 156) | | YYC (SEQ ID NO: 188) | |
| 78C5 | EVKLVESGGGLVK | WVRQTPEKRLEW | DSVQGRFTFSRDNARN | WGQGTLVTVSA |
| | PGGSLKLSCAASG | (SEQ ID NO: 175) | ILYLQMSSLRSEDTAM | (SEQ ID NO: 209) |
| | (SEQ ID NO: 156) | | YYC (SEQ ID NO: 188) | |
| 6G12 | EVQLQQSGPELVKP | WVKQSHGKSLEW | QKFKGKASLTVDKSSS | WGQGTSVTVSS |
| | GTSVKISCKTSG | (SEQ ID NO: 176) | TAYMELHSLASDDSA | (SEQ ID NO: 210) |
| | (SEQ ID NO: 157) | | VYYC (SEQ ID NO: 189) | |
| 8E10 | QVQLQQSGAELVR | WVKQTPVHGLEW | QKFKGKAILTADKSSS | WGQGTSVTVSS |
| | PGASVTLSCKASG | (SEQ ID NO: 177) | TAYMELRSLTSEDSAV | (SEQ ID NO: 210) |
| | (SEQ ID NO: 158) | | YYC (SEQ ID NO: 190) | |
| 7E5 | EVKLEESGGGLVQ | WVRQSPEKGLEW | ESVKGRFTISRDDSKST | WGQGTTLTVSS |
| | PGGSMKLSCAASG | (SEQ ID NO: 178) | VYLQMNTLRADDTGI | (SEQ ID NO: 211) |
| | (SEQ ID NO: 159) | | YYC (SEQ ID NO: 191) | |
| 7F8 | EVQLVESGGGLVQ | WVRQAPGKGLEW | DSVKDRITCSRDDSEN | WGTGTTVTVST |
| | PKGSLKLSCAASG | (SEQ ID NO: 179) | MFYLQLSSLKTEDTA | (SEQ ID NO: 212) |
| | (SEQ ID NO: 160) | | MYYC (SEQ ID NO: 192) | |
| 8F8 | QVQLQQSGAELVK | WVKQRPGRGLEW | EKFKTKATLTVDKPSS | WGQGTTLTVSS |
| | PGASVKLSCKASG | (SEQ ID NO: 180) | TAYMQVSSLTSEDSAV | (SEQ ID NO: 211) |
| | (SEQ ID NO: 161) | | YYC (SEQ ID NO: 193) | |
| 1H7 | ZVQLVESGGGLVQ | WVRQAPGKGLEW | DSVKDRFTCSRDDSEN | WGTGTTVTVSS |
| | PKGSLKLSCAASG | (SEQ ID NO: 179) | MFYLQLSSLKTEDTAI | (SEQ ID NO: 213) |
| | (SEQ ID NO: 162) | | YYC (SEQ ID NO: 194) | |
| 2H8 | EVQLVESGGGLVQ | WVRQAPGKGLEW | DSVKDRFTCSRDDSEN | WGTGTTVTVSS |
| | PKGSLKLSCAASG | (SEQ ID NO: 179) | MFYLQLSSLKTEDTA | (SEQ ID NO: 213) |
| | (SEQ ID NO: 160) | | MYYC (SEQ ID NO: 195) | |
| 3A2 | QVQLQQSGAELVK | WVKQRPGQGLVW | EKFKTKATLTVDTSSS | WGQGTLVTVST |
| | PGASVKMSCKTSG | (SEQ ID NO: 181) | TAYMHLSSLTSEDSAV | (SEQ ID NO: 214) |
| | (SEQ ID NO: 163) | | YFC (SEQ ID NO: 196) | |
| 3A7 | EVKLEESGGGLVQ | WVRQSPEKGLEW | ESVKGRFTISRDDSKST | WGQGTTLTVSS |
| | PGGSMKLSCAASG | (SEQ ID NO: 178) | VYLQMNTLRADDTGI | (SEQ ID NO: 211) |
| | (SEQ ID NO: 159) | | YYC (SEQ ID NO: 191) | |
| 3B10 | EVQLVZZGRGZSQ | GVPQGPGKGREW | DSVKDRFTZSRDDSES | WGQGTIVTVS |
| | GKGSXZZGRAZRC | (SEQ ID NO: 182) | LFYZQMSZZKZEDTA | (SEQ ID NO: 215) |
| | (SEQ ID NO: 164) | | MYYZ (SEQ ID NO: 197) | |
| 4F11 | QVQLQQSGAELVK | WVKQRPGQGLVW | EKFKTKATLTVDTSSS | WGQGTLVTVST |
| | PGASVKMSCKTSG | (SEQ ID NO: 181) | TAYMHLSSLTSEDSAV | (SEQ ID NO: 214) |
| | (SEQ ID NO: 163) | | YFC (SEQ ID NO: 196) | |
| 6H6 | EVKLEESGGGLVQ | WVRQSPEKGLEW | ESVKGRFTISRDDSKST | WGQGTLVTVSA |
| | PGGSMKLSCTASG | (SEQ ID NO: 178) | VYLQMNSLRTEDTGIY | (SEQ ID NO: 209) |
| | (SEQ ID NO: 165) | | YC (SEQ ID NO: 198) | |
| 7A9 | LSCAASG (SEQ ID | WVRQAPGKGLEW | DSVKDRFTISRDDSES | WGQGTLVTVSA |
| | NO: 166) | (SEQ ID NO: 179) | MLYLQMZNLKTEDTA | (SEQ ID NO: 209) |
| | | | MYYC (SEQ ID NO: 199) | |
| 7B3 | QVQLQQSGAVLVK | WVKQRPGRGPEW | EKFRNKAILTVDKPSS | WGQGTTLTVSS |
| | PGASVKLSCKASG | (SEQ ID NO: 183) | TAYMQLNSLTSEDZA | (SEQ ID NO: 211) |
| | (SEQ ID NO: 167) | | VYYC (SEQ ID NO: 200) | |
| 8A1 | EVQLQQSGAELVK | WVKQRPGKGLEW | GKFEGKATLTADKSSS | WGQGTLVTVSA |
| | PGASVKISCKASG | (SEQ ID NO: 184) | TAYMQLSSLTSEDSAV | (SEQ ID NO: 209) |
| | (SEQ ID NO: 168) | | YFC (SEQ ID NO: 201) | |
| 9F5 | QVQLQQSGPELVK | WVKQRPGKGLEW | GEFRVRATLTADTSST | WGQGASVTVSS |
| | PGASLKISCKASG | (SEQ ID NO: 184) | TAYMQLSSLTSEDSAV | (SEQ ID NO: 216) |
| | (SEQ ID NO: 169) | | YFC (SEQ ID NO: 202) | |
| 9G1 | QVQLQQSGAELVK | WVKQRPGRGPEW | EKFKTKATLTVDKPSS | WGQGTTLTVSS |
| | PGASVKLSCKASG | (SEQ ID NO: 183) | TADMQLSSLTSEDSAV | (SEQ ID NO: 211) |
| | (SEQ ID NO: 161) | | YYC (SEQ ID NO: 203) | |
| 9G3 | EVQLVESGGGLVQ | WVRQTPGKGLEW | DSVKDRFTISRDDSESI | WGRGTLV (SEQ ID |
| | PKGSLKLSCAAFG | (SEQ ID NO: 185) | VYVQMNNLKTEDTG | NO: 217) |
| | (SEQ ID NO: 170) | | MYSC (SEQ ID NO: 204) | |
| 10A9 | QVQLQQSGAEVVK | WVKQRPGQGLVW | ERFKTKATLTVDTSSS | WGQGTLVTVSA |
| | PGASVKMSCKTSG | (SEQ ID NO: 181) | TAYMHLSSLTSEDSAV | (SEQ ID NO: 209) |
| | (SEQ ID NO: 171) | | YFC (SEQ ID NO: 205) | |
| 11A8 | EVQLVESGGRLVQ | WVRQAPGKGLEW | DSVKDRFTISRDDSES | WGQGTLVTVSA |
| | PKGSLKLSCAASG | (SEQ ID NO: 179) | MLYLQMNNLKTEDTA | (SEQ ID NO: 209) |
| | (SEQ ID NO: 172) | | MYYC (SEQ ID NO: 206) | |
| 12D9 | QVQLQQYGPELVK | WMKQSHGKSLEW | QEFKGKATLTVDKSSS | WGQGT (SEQ ID |
| | PGASVKMSCKVSG | (SEQ ID NO: 186) | TAYMELRSLTFEDSAV | NO: 218) |
| | (SEQ ID NO: 173) | | YZC (SEQ ID NO: 207) | |
| 12F9 | WRIGQGKGSLKLA | RVRQGPGKGREW | DSVKDRFRASRDDSES | WGQGTLVTVSA |
| | RAARG (SEQ ID | (SEQ ID NO: 187) | MLYVQMSNWKQEDT | (SEQ ID NO: 209) |
| | NO: 174) | | AMYYG (SEQ ID | |
| | | | NO: 208) | |
| 10C1 | GVQSEVKFEESGG | WVRQSPEKGLEW | ESVKGRFTISRDDSKSS | WGQGTLVTVSA |
| | GLVQPGGSMKLSC | (SEQ ID NO: 178) | VSLQMNSLRTEDTGIY | (SEQ ID NO: 209) |
| | TASG (SEQ ID | | YC (SEQ ID NO: 599) | |
| | NO: 596) | | | |
| 7E9 | QVQLQQSGPELVK | WVKQSHGKSLEW | QKFKGKATLTVDRSSS | WGQGTSVTVSS |
| | PGASVKISCKTSG | (SEQ ID NO: 176) | TAYMELRSLTSEDSAV | (SEQ ID NO: 210) |
| | (SEQ ID NO: 597) | | YYC (SEQ ID NO: 600) | |
| 8C3 | QVQLQQSGPDLVK | WVKQSHGKSLEW | QKFKGKAILTVDKSSS | WGQGTTLTVSS |
| | PGASVKISCKASG | (SEQ ID NO: 176) | TAYMELRSLTSEDSAV | (SEQ ID NO: 211) |
| | (SEQ ID NO: 598) | | YYC (SEQ ID NO: 601) | |
| 1B4 | EVQLVESGGGLVK | WVRQTPEKRLEW | DSMKGRFTISRDNAKN | WGQGTTLTVSS |
| | PGGSLKLSCEA | (SEQ ID NO: 175) | FLYLQMSSLRSEDTAM | (SEQ ID NO: 211) |
| | (SEQ ID NO: 719) | | YYC (SEQ ID NO: 722) | |
| 6H2 | QVQLQESGPGLVQ | WIRQSPGKGLEW | AAFISRLNISKDNSKSQ | WGQGTLVTVSA |
| | PSQSLSIICTV (SEQ | (SEQ ID NO: 721) | VFFKMNSLQSDDTAIY | (SEQ ID NO: 209) |
| | ID NO: 720) | | YC (SEQ ID NO: 723) | |
| 7B11v1 | EVQLVESGGGLVK | WVRQTPEKRLEW | DSMKGRFTISRDNAKN | WGQGTTLTVSS |
| | PGGSLKLSCEA | (SEQ ID NO: 175) | FLYLQMSSLRSEDTAM | (SEQ ID NO: 211) |
| | (SEQ ID NO: 719) | | YYC (SEQ ID NO: 722) | |
| 7B11v2 | EVQZQQSGPELVKP | WVKQSLGKSLEW | QKFKGKATLTVDKSSS | RGTGTTVTV (SEQ |
| | GASVKISCKA (SEQ | (SEQ ID NO: 793) | TAYMELRSLTZEESAV | ID NO: 806) |
| | ID NO: 785) | | YYC (SEQ ID NO: 798) | |
| 18D8 | EVQLVESGGGLVK | WVRQTPEKRLEW | DSMKGRFTISRDNAKN | WGQGTTLTVSS |
| | PGGSLKLSCEA | (SEQ ID NO: 175) | FLYLQMSSLRSEDTAM | (SEQ ID NO: 211) |
| | (SEQ ID NO: 719) | | YYC (SEQ ID NO: 722) | |
| 18E4v1 | EVQLVESGGGLVK | WVRQTPEKRLEW | DSMKGRFTISRDNAKN | WGQGTTLTVSS |
| | PGGSLKLSCEA | (SEQ ID NO: 175) | FLYLQMSSLRSEDTAM | (SEQ ID NO: 211) |
| | (SEQ ID NO: 719) | | YYC (SEQ ID NO: 722) | |
| 18E4v2 | QVQLQQPGAELVK | WVKEKPGQGLEW | HNFKGKATLTVDKSSS | WGQGTSVTVSS |
| | PGASVKVSCKA | (SEQ ID NO: 794) | TAYMQLNSLTSEDSA | (SEQ ID NO: 210) |
| | (SEQ ID NO: 786) | | VYYC (SEQ ID NO: 799) | |
| 29F6v1 | EVQLVESGGGLVK | WVRQTPEKRLEW | DSMKGRFTISRDNAKN | WGQGTTLTVSS |
| | PGGSLKLSCEA | (SEQ ID NO: 175) | FLYLQMSSLRSEDTAM | (SEQ ID NO: 211) |
| | (SEQ ID NO: 719) | | YYC (SEQ ID NO: 722) | |
| 29F6v2 | QVQLQQSVAELVR | WVKQRPEQGLEW | PKFQATATITVATSSNS | WGHGTSVTVSS |
| | PGASVKLSCTA | (SEQ ID NO: 795) | AYLQLSSLASEDTAIY | (SEQ ID NO: 807) |
| | (SEQ ID NO: 787) | | YC (SEQ ID NO: 800) | |
| 40D5v1 | EVQLVESGGGLVK | WVRQTPEKRLEW | DSMKGRFTISRDNAKN | WGQGTTLTVSS |
| | PGGSLKLSCEA | (SEQ ID NO: 175) | FLYLQMSSLRSEDTAM | (SEQ ID NO: 211) |
| | (SEQ ID NO: 719) | | YYC (SEQ ID NO: 722) | |
| 40D5v2 | QVQLQQSGAELVK | WVKQRPGQGLEW | QKFKGKATLTVDKSSS | WSQGTLVTVS |
| | PGASVKVSCKA | (SEQ ID NO: 796) | TAYMQILSSLTSEDSA | (SEQ ID NO: 808) |
| | (SEQ ID NO: 788) | | VYYC (SEQ ID NO: 801) | |
| 43B9 | EVQLVESGGGLVK | WVRQTPEKRLEW | DSMKGRFTISRDNAKN | WGQGTTLTVSS |
| | PGGSLKLSCEA | (SEQ ID NO: 175) | FLYLQMSSLRSEDTAM | (SEQ ID NO: 211) |
| | (SEQ ID NO: 719) | | YYC (SEQ ID NO: 722) | |
| 44A8 | EVQLVESGGGLVK | WVRQTPEKRLEW | DSMKGRFTISRDNAKN | WGQGTTLTVSS |
| | PGGSLKLSCEA | (SEQ ID NO: 175) | FLYLQMSSLRSEDTAM | (SEQ ID NO: 211) |
| | (SEQ ID NO: 719) | | YYC (SEQ ID NO: 722) | |
| 44B4v1 | EVQLVESGGGLVK | WVRQTPEKRLEW | DSMKGRFTISRDNAKN | WGQGTTLTVSS |
| | PGGSLKLSCEA | (SEQ ID NO: 175) | FLYLQMSSLRSEDTAM | (SEQ ID NO: 211) |
| | (SEQ ID NO: 719) | | YYC (SEQ ID NO: 722) | |
| 44B4v2 | XXXXXQSGTELAR | WVKQRPGQGLEW | QKFKDKATLTADKSSS | WGTGTTVTVSS |
| | PGASVKMPCKA | (SEQ ID NO: 796) | TAYMQLSSLTSEESAV | (SEQ ID NO: 213) |
| | (SEQ ID NO: 789) | | YYC (SEQ ID NO: 802) | |
| 45D6 | QVQLQQSGRELVK | WVIQSHGESLEW | QKFKGKATLTVNKSSS | WGQGTSVTVSS |
| | PGASVKMSCMSSG | (SEQ ID NO: 797) | TAYMELRSLTSEDSAV | (SEQ ID NO: 210) |
| | (SEQ ID NO: 790) | | YYC (SEQ ID NO: 803) | |
| 29F7 | QVKLEESGGGLVQ | WVRQSPEKGLEW | ESVKGRFTISRDDSKSS | WGQGTTLTVSS |
| | PGGSMKLSCVASG | (SEQ ID NO: 178) | VYLQMNNLRAVDTGI | (SEQ ID NO: 211) |
| | (SEQ ID NO: 791) | | YYC (SEQ ID NO: 804) | |
| 32G1 | QVQLQQSGPELVK | WVKQSHGKSLEW | QKFKGKATLTVNKSSS | WGQGTLVTVSA |
| | PGASVQMSCEASG | (SEQ ID NO: 176) | TAYIELRSLTSEDSAV | (SEQ ID NO: 209) |
| | (SEQ ID NO: 792) | | YHC (SEQ ID NO: 805) | |

[0551] Characterization of TREM2 Antibody Binding

[0552] Initial characterization of TREM2 antibodies involved determining their ability to bind TREM2 expressed on macrophages and other primary human or mouse immune cells. Cells were harvested, plated at 10⁵/ml in a 96 well plate, washed, and incubated in 100 ul PBS containing 10-50 ug/ml Mab and Fc blocking reagent for 1 hour in ice. Cells were then washed twice and incubated in 100 ul PBS containing 5 ug/ml PE-conjugated secondary antibody for 30 minutes in ice. Cells were washed twice in cold PBS and acquired on a BD FACS Canto. Data analysis and calculation of mean fluorescence intensity (MFI) values or % positive cells was performed with FlowJo (TreeStar) software version 10.0.7.

[0553] Antibodies 7E5 and 2H8, for example, demonstrated binding to a mouse cell line (BWZ T2) expressing recombinant mouse TREM2, as indicated by positive TREM2 antibody staining detected via FACS analysis (black outlined histograms) (FIG. 3A). The negative isotype control (antibody mIgG1) did not demonstrate binding. Antibodies 7E5 and 2H8 demonstrated antibody binding to WT (TREM+/+) bone marrow derived mouse macrophages (BMMac, mMac), but not to TREM2 deficient (TREM2−/−) mouse macrophages (BMMac, mMacs) (FIG. 3B). FIG. 3C shows a dose response curve demonstrating dose-dependent binding of the TREM2 antibody 7E5 to BWZ cells expressing recombinant mouse TREM2 but not to parental BWZ cells. Antibodies 10A9, 10C1, and 8F8 demonstrated binding to both a human cell line (293) expressing recombinant human TREM2 (FIG. 4A) and to primary human dendritic cells (hDC) (FIG. 4B).

[0554] Mean fluorescent intensities (MFI) values for mouse cell types bound by TREM2 antibodies 1H7, 2F6, 2H8, 3A7, 3B10, 7E5, 7F8, 8F8, and 11H5 are listed in Table 5. Binding is compared to the parental cell line (BWZ parental) and to BWZ cells that overexpress mouse TREM2 (BWZmT2). The table also depicts binding to primary mouse macrophages deficient in TREM2 (KO BMMACS), compared to wild-type primary macrophages (WT BMMACS). The results in Table 5 indicate that antibodies 1H7, 2F6, 2H8, 3A7, 3B10, 7E5, 7F8, 8F8, and 11H5 bind specifically to cell lines overexpressing mouse TREM2 on the cell membrane, but not to control cell lines that do not express TREM2. The antibodies also bind to mouse primary macrophages. Binding to mouse primary cells is specific, as it is not detected on primary cells derived from TREM2 KO mice or with the isotype control antibody mIgG1.

[0555] In Table 5, “mIgG1” refers to an isotype control antibody, “NT” refers to non-treated control, “2° Ab only” refers to a secondary antibody-only control, “RDT2” refers to a commercially available anti-TREM2 antibody (R&D Cat#F7E57291), and “ND” refers to not determined.

TABLE 5
Anti-TREM2 antibody binding to mouse cells

| | | MFI | % Positive | % Positive | K_{D} cell |
|---|---|---|---|---|---|
| | MFI | BWZ | WT | KO | binding |
| Antibody | BWZmT2 | parental | BMMACS | BMMACS | (nM) |
| 1H7 | 1963 | 76.9 | 40.4 | 0.961 | 3.53 |
| 2F6 | 1219 | 120 | 10.1 | 1.12 | 1.22 |
| 2H8 | 2668 | 66.2 | 36.5 | 1.13 | 6.86 |
| 3A7 | 2866 | 110 | 26.3 | 1.03 | 5.86 |
| 3B10 | 1309 | 123 | 7.22 | 0.735 | ND |
| 7E5 | 3038 | 127 | 27.6 | 3.97 | 10.38 |
| 7F8 | 1498 | 56.2 | 42.1 | 0.717 | 1.78 |
| 8F8 | 1644 | 53.5 | 6.42 | 1.09 | 6.90 |
| 11H5 | 1745 | 103 | 7.87 | 0.894 | 1.53 |
| mIgG1 | 278.00 | 125.00 | 0.574 | 0.725 | ND |
| NT | 245.00 | 134.00 | 0 | 0.0273 | ND |
| 2º Ab only | 123.00 | 68.00 | 0.523 | 0.836 | ND |
| RDT2 | ND | ND | 13.1 | 0.059 | ND |

[0556] Mean fluorescent intensities (MFI) values for human cell types bound by TREM2 antibodies 1A7, 3A2, 3B10, 6G12, 6H6, 7A9, 7B3, 8A1, 8E10, 8F11, 8F8, 9F5, 9G1, 9G3, 10A9, 10C1, 11A8, 12D9, 12E2, 12F9, and 12G6 are listed in Table 6. Binding is compared to the parental cell line (HEK parental) and to HEK cells that overexpress human TREM2 (HEKhT2). The table also depicts binding to primary human dendritic cells (hDC) and macrophages (hMAC). The results in Table 6 in indicate that antibodies 1A7, 3A2, 3B10, 6G12, 6H6, 7A9, 7B3, 8A1, 8E10, 8F11, 8F8, 9F5, 9G1, 9G3, 10A9, 10C1, 11A8, 12D9, 12E2, 12F9, and 12G6 bind specifically to cell lines overexpressing human TREM2 on the cell membrane, but not to control cell lines that do not express TREM2. The antibodies also bind to human primary dendritic cell s and macrophages. Binding to human primary cells is specific, as it is not detected with the isotype control antibodies mIgG1, mIgG2a, mIgG2b.

[0557] In Table 6, “Media” refers to a culture media only control, “2° Ab only” refers to a secondary antibody-only control, “mIgG1” refers to mouse IgG1 isotype control antibody, “mIgG2a” refers to mouse IgG2a isotype control antibody, “mIgG2b” refers to mouse IgG2b isotype control antibody, “mIgM” refers to mouse IgM isotype control antibody, “rIgG1” refers to rat IgG1 isotype control antibody, “RIgG2a” refers to rat IgG2a isotype control antibody, “RIgG2b” refers to rat IgG2b isotype control antibody, and “ND” refers to not determined.

TABLE 6
Anti-TREM2 antibody binding to human cells

| | | | | | K_{D} cell |
|---|---|---|---|---|---|
| | MFI | MFI | % Positive | % Positive | binding |
| Antibody | HEKhT2 | HEK parental | hDC | hMAC | (nM) |
| 1A7 | 4968 | 61 | 85 | 16 | 3.39 |
| 3A2 | 7297 | 74 | 77 | 18 | 4.98 |
| 3B10 | 2870 | 76 | 55 | 11 | 7.02 |
| 6G12 | 5484 | 50 | 82 | 19 | 4.11 |
| 6H6 | 13499 | 30 | 93 | 46 | 11.00 |
| 7A9 | 3316 | 31 | 59 | 12 | 6.56 |
| 7B3 | 4509 | 67 | 76 | 29 | 5.334 |
| 8A1 | 11013 | 18 | 94 | 34 | 4.637 |
| 8E10 | 9202 | 15 | 76 | 17 | 3.39 |
| 8F11 | 9668 | 32 | 79 | 15 | 2.905 |
| 8F8 | 3333 | 42 | 80 | 25 | 6.945 |
| 9F5 | 2911 | 56 | 73 | 26 | 0.96 |
| 9G1 | 3085 | 30 | 60 | 20 | 9.061 |
| 9G3 | 10677 | 22 | 78 | 30 | 12.21 |
| 10A9 | 11891 | 27 | 96 | 64 | 4.239 |
| 10C1 | 12956 | 70 | 92 | 46 | 8.904 |
| 11A8 | 2915 | 25 | 72 | 19 | 4.428 |
| 12E2 | 3616 | 20 | 63 | 13 | 12.71 |
| 12F9 | 2249 | 29 | 52 | 12 | 10.72 |
| 12G6 | 2521 | 39 | 73 | 23 | 4.224 |
| 2C7 | 4666 | 67 | 30 | 8 | ND |
| 2F5 | 948 | 65 | 6 | 2 | ND |
| 3C1 | 3560 | 55 | 30 | 13 | ND |
| 4D7 | 2418 | 132 | 17 | 8 | ND |
| 4D11 | 2222 | 41 | 16 | 10 | ND |
| 6C11 | 3279 | 55 | 21 | 3 | ND |
| 6G12 | 3288 | 135 | 15 | 7 | ND |
| 7A3 | 9573 | 98 | 33 | 3 | ND |
| 7C5 | 2812 | 77 | 15 | 13 | ND |
| 7E9 | 4553 | 60 | 35 | 12 | ND |
| 7F6 | 4265 | 107 | 31 | 7 | ND |
| 7G1 | 2262 | 99 | 11 | 1 | ND |
| 7H1 | 4556 | 100 | 11 | 8 | ND |
| 8C3 | 3631 | 47 | 32 | 3 | ND |
| 8F10 | 3460 | 102 | 9 | 5 | ND |
| 12A1 | 7599 | 72 | 26 | 3 | ND |
| 1E9 | 15076 | 107 | 75.5 | 16.8 | ND |
| 2C5 | 17811 | 247 | 56.4 | 11.0 | ND |
| 3C5 | 15696 | 127 | 85.8 | 29.1 | ND |
| 4C12 | 14671 | 158 | 84.2 | 26.1 | ND |
| 4F2 | 19264 | 116 | 85.3 | 25.2 | ND |
| 5A2 | 12642 | 187 | 68.0 | 19.4 | ND |
| 6B3 | 16697 | 102 | 81.1 | 14.4 | ND |
| 7D1 | 10742 | 121 | 69.9 | 19.3 | ND |
| 7D9 | 18659 | 150 | 93.9 | 43.3 | ND |
| 11D8 | 17254 | 121 | 69.7 | 20.1 | ND |
| 8A12 | 745 | 59.9 | 70.2 | 13.7 | ND |
| 10E7 | 3935 | 33.1 | 58.4 | 6.3 | ND |
| 10B11 | 14996 | 69.9 | 39.9 | 7.3 | ND |
| 10D2 | 6925 | 48 | 38.8 | 27.3 | ND |
| 7D5 | 2276 | 70.2 | 18.6 | 20.5 | ND |
| 2A7 | 8544 | 56.5 | 39.0 | 28.1 | ND |
| 3G12 | 1043 | 43.8 | 11.7 | 15.5 | ND |
| 6H9 | 6353 | 42.9 | 53.6 | 36.3 | ND |
| 8G9 | 4889 | 36.4 | 32.0 | 23.4 | ND |
| 9B4 | 6161 | 38.1 | 68.4 | 43.2 | ND |
| 10A1 | 2086 | 42.6 | 55.3 | 31.1 | ND |
| 11A8 | 1343 | 36.9 | 15.9 | 22.5 | ND |
| 12F3 | 7859 | 45.6 | 14.3 | 18.9 | ND |
| 2F8 | ND | ND | ND | ND | ND |
| 10E3 | ND | ND | ND | ND | ND |
| 1B4 | 8766 | 89.1 | 93.1 | ND | 6.2 |
| 6H2 | 13539 | 31 | 83.9 | ND | 5.4 |
| 7B11 | 12835 | 27.5 | 82.8 | ND | 3.7 |
| 18D8 | 7177 | 45.5 | 83.55 | ND | 3.7 |
| 18E4 | 978 | 21.3 | 15.4 | ND | 41.6 |
| 29F6 | 5851 | 29.7 | 94.55 | ND | 3.2 |
| 40D5 | 2136 | 38.9 | 74.2 | ND | 78.1 |
| 43B9 | 10082 | 238 | 76.8 | ND | 5.5 |
| 44A8 | 6912 | 25 | 17.1 | ND | 4.1 |
| 44B4 | 1409 | 24.4 | 89.05 | ND | 206.0 |
| 45D6 | 13888 | 22.2 | 81.1 | ND | 3.8 |
| 29F7 | 7755 | 43.8 | 85 | ND | 13.3 |
| 32G1 | 6018 | 70.7 | 95.35 | ND | 43.5 |
| Media | 22.6 | 86.3 | 0.6 | 0.7 | ND |
| 2º Ab only | 17.2 | 67.3 | 5.0 | 4.8 | ND |
| mIgG1 | 16.3 | 83.2 | 4.9 | 2.7 | ND |
| mIgG2a | 40.3 | 81.4 | 7.3 | 7.9 | ND |
| mIgG2b | 13 | 32.3 | 6.1 | 5.3 | ND |
| mIgM | 124 | 11.4 | 14.9 | 63.7 | ND |
| RIgG1 | 544 | 426 | 8.7 | 19.6 | ND |
| RIgG2a | 33 | 26.7 | 6.2 | 10.4 | ND |
| RIgG2b | 35 | 18.55 | 0.3 | 0.9 | ND |

[0558] Antibody Humanization

[0559] Antibody humanization is used to transform antibodies generated in a different species to best resemble a human antibody through sequence and structural relationships in order to prevent immunogenicity in human administration. Antibodies from different species share characteristic sequence and structural features that allow the grafting of the specificity-determining regions (SDRs) of the non-human antibody onto a human antibody framework. This results in retention of the specificity of the non-human antibody. The humanization process involves identification of the non-human antibody sequence and features, including the framework regions and SDRs. The following criteria are used to humanize an antibody: 1) percent similarity in framework regions between non-human and known human antibodies, 2) length similarity in SDRs between non-human and known human antibodies, 3) genes used to generate the framework regions of the human antibody, and 4) previous use of human antibody frameworks in humanizations and as therapeutics. Similarity in framework regions and SDR lengths are important because differences can generate structural differences in the antibody that can alter the specificity of the antibody. Specific genes used to generate the framework of human antibodies are known to be beneficial or detrimental to the stability or specificity of the antibody and are selectively used or avoided, accordingly. Lastly, previously successful humanization frameworks, including those used in human therapeutics, which are well tolerated with good half-lives, are likely candidates for future successful humanizations.

[0560] As shown in Tables 7A and 7B, humanized light chain and heavy variable region sequences were identified for each of the antibodies 4D11, 7C5, 6G12, 8F11, 8E10, 7E5, 7F8, 8F8, 1H7, 2H8, 3A2, 3A7, 3B10, 4F11, 6H6, 7A9, 7B3, 8A1, 9F5, 9G1, 9G3, 10A9, 11A8, 12D9, 12F9, 10C1, 7E9, and 8C1. In Tables 7A and 7B, bolded letters indicate CDR sequences.

TABLE 7A
Humanized light chain variable region sequences

| Antibody variant | Humanized sequences |
|---|---|
| Antibody 4D11 | Antibody 4D11 |
| 4D11V3-15 | EIVMTQSPATLSVSPGERATLSCRASENIYSFLAWYQQKPGQAPRLLIYNSKTF |
| | AEGIPARFSGSGSGFEFTLTISSLQSEDFAVYYCQHHYGTPPWTFGQGTKVEIK |
| | (SEQ ID NO: 220) |
| 4D11V1-9 | DIQLTQSPSFLSASVGDRVTITCRASENIYSFLAWYQQKPGKAPKLLIYNSKTF |
| | AEGVPSRFSGSGSGTEFTLTISSLQPEDFATYYCQHHYGTPPWTFGQGTKVEIK |
| | (SEQ ID NO: 221) |
| 4D11V3-11 | EIVLTQSPATLSLSPGERATLSCRASENIYSFLAWYQQKPGQAPRLLIYNSKTFA |
| | EGIPARFSGSGSGTDFTLTISSLEPEDFAVYYCQHHYGTPPWTFGQGTKVEIK |
| | (SEQ ID NO: 222) |
| 4D11V1-5 | DIQMTQSPSTLSASVGDRVTITCRASENIYSFLAWYQQKPGKAPKLLIYNSKTF |
| | AEGVPSRFSGSGSGTEFTLTISSLQPDDFATYYCQHHYGTPPWTFGQGTKVEIK |
| | (SEQ ID NO: 223) |
| 4D11V1-39 | DIQMTQSPSSLSASVGDRVTITCRASENIYSFLAWYQQKPGKAPKLLIYNSKTF |
| | AEGVPSRFSGSGSGTDFTLTISSLQPEDFATYYCQHHYGTPPWTFGQGTKVEIK |
| | (SEQ ID NO: 224) |
| 4D11V1-33 | DIQMTQSPSSLSASVGDRVTITCRASENIYSFLAWYQQKPGKAPKLLIYNSKTF |
| | AEGVPSRFSGSGSGTDFTFTISSLQPEDIATYYCQHHYGTPPWTFGQGTKVEIK |
| | (SEQ ID NO: 225) |
| 4D11V3-20 | EIVLTQSPGTLSLSPGERATLSCRASENIYSFLAWYQQKPGQAPRLLIYNSKTFA |
| | EGIPDRFSGSGSGTDFTLTISRLEPEDFAVYYCQHHYGTPPWTFGQGTKVEIK |
| | (SEQ ID NO: 226) |
| 4D11V2-28 | DIVMTQSPLSLPVTPGEPASISCRASENIYSFLAWYLQKPGQSPQLLIYNSKTFA |
| | EGVPDRFSGSGSGTDFTLKISRVEAEDVGVYYCQHHYGTPPWTFGQGTKVEIK |
| | (SEQ ID NO: 227) |
| 4D11V2-30 | DVVMTQSPLSLPVTLGQPASISCRASENIYSFLAWFQQRPGQSPRRLIYNSKTF |
| | AEGVPDRFSGSGSGTDFTLKISRVEAEDVGVYYCQHHYGTPPWTFGQGTKVEI |
| | K (SEQ ID NO: 228) |
| 4D11V4-1 | DIVMTQSPDSLAVSLGERATINCRASENIYSFLAWYQQKPGQPPKLLIYNSKTF |
| | AEGVPDRFSGSGSGTDFTLTISSLQAEDVAVYYCQHHYGTPPWTFGQGTKVEI |
| | K (SEQ ID NO: 229) |
| Antibody 7C5 | Antibody 7C5 |
| 7C5V3-15 | EIVMTQSPATLSVSPGERATLSCRASENIYSFLAWYQQKPGQAPRLLIYNSKTF |
| | AEGIPARFSGSGSGTEFTLTISSLQSEDFAVYYCQHHYGTPPWTFGQGTKVEIK |
| | (SEQ ID NO: 220) |
| 7C5V1-9 | DIQLTQSPSFLSASVGDRVTITCRASENIYSFLAWYQQKPGKAPKLLIYNSKTF |
| | AEGVPSRFSGSGSGTEFTLTISSLQPEDFATYYCQHHYGTPPWTFGQGTKVEIK |
| | (SEQ ID NO: 221) |
| 7C5V3-11 | EIVLTQSPATLSLSPGERATLSCRASENIYSFLAWYQQKPGQAPRLLIYNSKTFA |
| | EGIPARFSGSGSGTDFTLTISSLEPEDFAVYYCQHHYGTPPWTFGQGTKVEIK |
| | (SEQ ID NO: 222) |
| 7C5V1-5 | DIQMTQSPSTLSASVGDRVTITCRASENIYSFLAWYQQKPGKAPKLLIYNSKTF |
| | AEGVPSRFSGSGSGTEFTLTISSLQPDDFATYYCQHHYGTPPWTFGQGTKVEIK |
| | (SEQ ID NO: 223) |
| 7C5V1-39 | DIQMTQSPSSLSASVGDRVTITCRASENIYSFLAWYQQKPGKAPKLLIYNSKTF |
| | AEGVPSRFSGSGSGTDFTLTISSLQPEDFATYYCQHHYGTPPWTFGQGTKVEIK |
| | (SEQ ID NO: 224) |
| 7C5V1-33 | DIQMTQSPSSLSASVGDRVTITCRASENIYSFLAWYQQKPGKAPKLLIYNSKTF |
| | AEGVPSRFSGSGSGTDFTFTISSLQPEDIATYYCQHHYGTPPWTFGQGTKVEIK |
| | (SEQ ID NO: 225) |
| 7C5V3-20 | EIVLTQSPGTLSLSPGERATLSCRASENIYSFLAWYQQKPGQAPRLLIYNSKTFA |
| | EGIPDRFSGSGSGTDFTLTISRLEPEDFAVYYCQHHYGTPPWTFGQGTKVEIK |
| | (SEQ ID NO: 226) |
| 7C5V2-28 | DIVMTQSPLSLPVTPGEPASISCRASENIYSFLAWYLQKPGQSPQLLIYNSKTFA |
| | EGVPDRFSGSGSGTDFTLKISRVEAEDVGVYYCQHHYGTPPWTFGQGTKVEIK |
| | (SEQ ID NO: 227) |
| 7C5V2-30 | DVVMTQSPLSLPVTLGQPASISCRASENIYSFLAWFQQRPGQSPRRLIYNSKTF |
| | AEGVPDRFSGSGSGTDFTLKISRVEAEDVGVYYCQHHYGTPPWTFGQGTKVEI |
| | K (SEQ ID NO: 228) |
| 7C5V4-1 | DIVMTQSPDSLAVSLGERATINCRASENIYSFLAWYQQKPGQPPKLLIYNSKTF |
| | AEGVPDRFSGSGSGTDFTLTISSLQAEDVAVYYCQHHYGTPPWTFGQGTKVEI |
| | K (SEQ ID NO: 229) |
| Antibody 6G12 | Antibody 6G12 |
| 6G12V4-1 | DIVMTQSPDSLAVSLGERATINCKSSQSLLYSSNQKNCLAWYQQKPGQPPKLL |
| | IYWAFTRESGVPDRFSGSGSGTDFTLTISSLQAEDVAVYYCQQYYSYPLTFGQ |
| | GTKVEIK (SEQ ID NO: 231) |
| 6G12V2-30 | DVVMTQSPLSLPVTLGQPASISCKSSQSLLYSSNQKNCLAWFQQRPGQSPRRLI |
| | YWAFTRESGVPDRFSGSGSGTDFTLKISRVEAEDVGVYYCQQYYSYPLTFGQ |
| | GTKVEIK (SEQ ID NO: 232) |
| 6G12V2-28 | DIVMTQSPLSLPVTPGEPASISCKSSQSLLYSSNQKNCLAWYLQKPGQSPQLLI |
| | YWAFTRESGVPDRFSGSGSGTDFTLKISRVEAEDVGVYYCQQYYSYPLTFGQ |
| | GTKVEIK (SEQ ID NO: 233) |
| 6G12V1-9 | DIQLTQSPSFLSASVGDRVTITCKSSQSLLYSSNQKNCLAWYQQKPGKAPKLLI |
| | YWAFTRESGVPSRFSGSGSGTEFTLTISSLQPEDFATYYCQQYYSYPLTFGQGT |
| | KVEIK (SEQ ID NO: 234) |
| 6G12V1-5 | DIQMTQSPSTLSASVGDRVTITCKSSQSLLYSSNQKNCLAWYQQKPGKAPKLL |
| | IYWAFTRESGVPSRFSGSGSGTEFTLTISSLQPDDFATYYCQQYYSYPLTFGQG |
| | TKVEIK (SEQ ID NO: 235) |
| 6G12V3-15 | EIVMTQSPATLSVSPGERATLSCKSSQSLLYSSNQKNCLAWYQQKPGQAPRLLI |
| | YWAFTRESGIPARFSGSGSGTEFTLTISSLQSEDFAVYYCQQYYSYPLTFGQGT |
| | KVEIK (SEQ ID NO: 236) |
| 6G12V1-33 | DIQMTQSPSSLSASVGDRVTITCKSSQSLLYSSNQKNCLAWYQQKPGKAPKLLI |
| | YWAFTRESGVPSRFSGSGSGTDFTFTISSLQPEDIATYYCQQYYSYPLTFGQGT |
| | KVEIK (SEQ ID NO: 237) |
| 6G12V1-39 | DIQMTQSPSSLSASVGDRVTITCKSSQSLLYSSNQKNCLAWYQQKPGKAPKLLI |
| | YWAFTRESGVPSRFSGSGSGTDFTLTISSLQPEDFATYYCQQYYSYPLTFGQGT |
| | KVEIK (SEQ ID NO: 238) |
| 6G12V3-11 | EIVLTQSPATLSLSPGERATLSCKSSQSLLYSSNQKNCLAWYQQKPGQAPRLLI |
| | YWAFTRESGIPARFSGSGSGTDFTLTISSLEPEDFAVYYCQQYYSYPLTFGQGT |
| | KVEIK (SEQ ID NO: 239) |
| 6G12V3-20 | EIVLTQSPGTLSLSPGERATLSCKSSQSLLYSSNQKNCLAWYQQKPGQAPRLLI |
| | YWAFTRESGIPDRFSGSGSGTDFTLTISRLEPEDFAVYYCQQYYSYPLTFGQGT |
| | KVEIK (SEQ ID NO: 240) |
| Antibody 8F11 | Antibody 8F11 |
| 8F11V2-30 | DVVMTQSPLSLPVTLGQPASISCKSSQSLLYSNGKTFLSWFQQRPGQSPRRLIY |
| | LVSKLDSGVPDRFSGSGSGTDFTLKISRVEAEDVGVYYCMQGTHFPLTFGQGT |
| | KVEIK (SEQ ID NO: 242) |
| 8F11V2-28 | DIVMTQSPLSLPVTPGEPASISCKSSQSLLYSNGKTFLSWYLQKPGQSPQLLIYL |
| | VSKLDSGVPDRFSGSGSGTDFTLKISRVEAEDVGVYYCMQGTHFPLTFGQGT |
| | KVEIK (SEQ ID NO: 243) |
| 8F11V4-1 | DIVMTQSPDSLAVSLGERATINCKSSQSLLYSNGKTFLSWYQQKPGQPPKLLIY |
| | LVSKLDSGVPDRFSGSGSGTDFTLTISSLQAEDVAVYYCMQGTHFPLTFGQGT |
| | KVEIK (SEQ ID NO: 244) |
| 8F11V1-5 | DIQMTQSPSTLSASGDRVTITCKSSQSLLYSNGKTFLSWYQQKPGKAPKLLIY |
| | LVSKLDSGVPSRFSGSGSGTEFTLTISSLQPDDFATYYCMQGTHFPLTFGQGTK |
| | VEIK (SEQ ID NO: 245) |
| 8F11V1-9 | DIQLTQSPSFLSASVGDRVTITCKSSQSLLYSNGKTFLSWYQQKPGKAPKLLIY |
| | LVSKLDSGVPSRFSGSGSGTEFTLTISSLQPEDFATYYCMQGTHFPLTFGQGTK |
| | VEIK (SEQ ID NO: 246) |
| 8F11V1-39 | DIQMTQSPSSLSASVGDRVTITCKSSQSLLYSNGKTFLSWYQQKPGKAPKLLIY |
| | LVSKLDSGVPSRFSGSGSGTDFTLTISSLQPEDFATYYCMQGTHFPLTFGQGTK |
| | VEIK (SEQ ID NO: 247) |
| 8F11V1-33 | DIQMTQSPSSLSASVGDRVTITCKSSQSLLYSNGKTFLSWYQQKPGKAPKLLIY |
| | LVSKLDSGVPSRFSGSGSGTDFTFTISSLQPEDIATYYCMQGTHFPLTFGQGTK |
| | VEIK (SEQ ID NO: 248) |
| 8F11V3-15 | EIVMTQSPATLSVSPGERATLSCKSSQSLLYSNGKTFLSWYQQKPGQAPRLLIY |
| | LVSKLDSGIPARFSGSGSGTEFTLTISSLQSEDFAVYYCMQGTHFPLTFGQGTK |
| | VEIK (SEQ ID NO: 249) |
| 8F11V3-11 | EIVLTQSPATLSLSPGERATLSCKSSQSLLYSNGKTFLSWYQQKPGQAPRLLIY |
| | LVSKLDSGIPARFSGSGSGTDFTLTISSLEPEDFAVYYCMQGTHFPLTFGQGTK |
| | VEIK (SEQ ID NO: 250) |
| 8F11V3-20 | EIVLTQSPGTLSLSPGERATLSCKSSQSLLYSNGKTFLSWYQQKPGQAPRLLIY |
| | LVSKLDSGIPDRFSGSGSGTDFTLTISRLEPEDFAVYYCMQGTHFPLTFGQGTK |
| | VEIK (SEQ ID NO: 251) |
| Antibody 8E10 | Antibody 8E10 |
| 8E10V2-30 | DVVMTQSPLSLPVTLGQPASISCKSSQSLLDSDGKTYLNWFQQRPGQSPRRLIY |
| | LVSKLDSGVPDRFSGSGSGTDFTLKISRVEAEDVGVYYCWQGTHFPYTFGQG |
| | TKVEIK (SEQ ID NO: 253) |
| 8E10V2-28 | DIVMTQSPLSLPVTPGEPASISCKSSQSLLDSDGKTYLNWYLQKPGQSPQLLIY |
| | LVSKLDSGVPDRFSGSGSGTDFTLKISRVEAEDVGVYYCWQGTHFPYTFGQG |
| | TKVEIK (SEQ ID NO: 254) |
| 8E10V4-1 | DIVMTQSPDSLAVSLGERATINCKSSQSLLDSDGKTYLNWYQQKPGQPPKLLI |
| | YLVSKLDSGVPDRFSGSGSGTDFTLTISSLQAEDVAVYYCWQGTHFPYTFGQG |
| | TKVEIK (SEQ ID NO: 255) |
| 8E10V1-9 | DIQLTQSPSFLSASVGDRVTITCKSSQSLLDSDGKTYLNWYQQKPGKAPKLLIY |
| | LVSKLDSGVPSRFSGSGSGTEFTLTISSLQPEDFATYYCWQGTHFPYTFGQGTK |
| | VEIK (SEQ ID NO: 256) |
| 8E10V1-5 | DIQMTQSPSTLSASVGDRVTITCKSSQSLLDSDGKTYLNWYQQKPGKAPKLLI |
| | YLVSKLDSGVPSRFSGSGSGTEFTLTISSLQPDDFATYYCWQGTHFPYTFCTQGT |
| | KVEIK (SEQ ID NO: 257) |
| 8E10V1-39 | DIQMTQSPSSLSASVGDRVTITCKSSQSLLDSDGKTYLNWYQQKPGKAPKLLI |
| | YLVSKLDSGVPSRFSGSGSGTDFTLTISSLQPEDFATYYCWQGTHFPYTFGQGT |
| | KVEIK (SEQ ID NO: 258) |
| 8E10V1-33 | DIQMTQSPSSLSASVGDRVTITCKSSQSLLDSDGKTYLNWYQQKPGKAPKLLI |
| | YLVSKLDSGVPSRFSGSGSGTDFTFTISSLQPEDIATYYCWQGTHFPYTFGQGT |
| | KVEIK (SEQ ID NO: 259) |
| 8E10V3-11 | EIVLTQSPATLSLSPGERATLSCKSSQSLLDSDGKTYLNWYQQKPGQAPRLLIY |
| | LVSKLDSGIPARFSGSGSGTDFTLTISSLEPEDFAVYYCWQGTHFPYTFGQGTK |
| | VEIK (SEQ ID NO: 260) |
| 8E10V3-15 | EIVMTQSPATLSVSPGERATLSCKSSQSLLDSDGKTYLNWYQQKPGQAPRLLI |
| | YLVSKLDSGIPARFSGSGSGTEFTLTISSLQSEDFAVYYCWQGTHFPYTFGQGT |
| | KVEIK (SEQ ID NO: 261) |
| 8E10V3-20 | EIVLTQSPGTLSLSPGERATLSCKSSQSLLDSDGKTYLNWYQQKPGQAPRLLIY |
| | LVSKLDSGIPDRFSGSGSGTDFTLTISRLEPEDFAVYYCWQGTHFPYTFGQGTK |
| | VEIK (SEQ ID NO: 262) |
| Antibody 7E5 | Antibody 7E5 |
| 7E5V2-30 | DVVMTQSPLSLPVTLGQPASISCKSSQSLLYSNGKTFLSWFQQRPGQSPRRLIY |
| | LVSKLDSGVPDRFSGSGSGTDFTLKISRVEAEDVGVYYCMQGTHFPLTFGQGT |
| | KVEIK (SEQ ID NO: 242) |
| 7E5V2-28 | DIVMTQSPLSLPVTPGEPASISCKSSQSLLYSNGKTFLSWYLQKPGQSPQLLIYL |
| | VSKLDSGVPDRFSGSGSGTDFTLKISRVEAEDVGVYYCMQGTHFPLTFGQGT |
| | KVEIK (SEQ ID NO: 243) |
| 7E5V4-1 | DIVMTQSPDSLAVSLGERATINCKSSQSLLYSNGKTFLSWYQQKPGQPPKLLIY |
| | LVSKLDSGVPDRFSGSGSGTDFTLTISSLQAEDVAVYYCMQGTHFPLTFGQGT |
| | KVEIK (SEQ ID NO: 244) |
| 7E5V1-5 | DIQMTQSPSTLSASVGDRVTITCKSSQSLLYSNGKTFLSWYQQKPGKAPKLLIY |
| | LVSKLDSGVPSRFSGSGSGTEFTLTISSLQPDDFATYYCMQGTHFPLTFGQGTK |
| | VEIK (SEQ ID NO: 245) |
| 7E5V1-9 | DIQLTQSPSFLSASVGDRVTITCKSSQSLLYSNGKTFLSWYQQKPGKAPKLLIY |
| | LVSKLDSGVPSRFSGSGSGTEFTLTISSLQPEDFATYYCMQGTHFPLTFGQGTK |
| | VEIK (SEQ ID NO: 246) |
| 7E5V1-39 | DIQMTQSPSSLSASVGDRVTITCKSSQSLLYSNGKTFLSWYQQKPGKAPKLLIY |
| | LVSKLDSGVPSRFSGSGSGTDFTLTISSLQPEDFATYYCMQGTHFPLTFGQGTK |
| | VEIK (SEQ ID NO: 247) |
| 7E5V1-33 | DIQMTQSPSSLSASVGDRVTITCKSSQSLLYSNGKTFLSWYQQKPGKAPKLLIY |
| | LVSKLDSGVPSRFSGSGSGTDFTFTISSLQPEDIATYYCMQGTHFPLTFGQGTK |
| | VEIK (SEQ ID NO: 248) |
| 7E5V3-15 | EIVMTQSPATLSVSPGERATLSCKSSQSLLYSNGKTFLSWYQQKPGQAPRLLIY |
| | LVSKLDSGIPARFSGSGSGTEFTLTISSLQSEDFAVYYCMQGTHFPLTFGQGTK |
| | VEIK (SEQ ID NO: 249) |
| 7E5V3-11 | EIVLTQSPATLSLSPGERATLSCKSSQSLLYSNGKTFLSWYQQKPGQAPRLLIY |
| | LVSKLDSGIPARFSGSGSGTDFTLTISSLEPEDFAVYYCMQGTHFPLTFGQGTK |
| | VEIK (SEQ ID NO: 250) |
| 7E5V3-20 | EIVLTQSPGTLSLSPGERATLSCKSSQSLLYSNGKTFLSWYQQKPGQAPRLLIY |
| | LVSKLDSGIPDRFSGSGSGTDFTLTISRLEPEDFAVYYCMQGTHFPLTFGQGTK |
| | VEIK (SEQ ID NO: 251) |
| Antibody 7F8 | Antibody 7F8 |
| 7F8V3-11 | EIVLTQSPATLSLSPGERATLSCSASSSVSYMYWYQQKPGQAPRLLIYLTSILAS |
| | GIPARFSGSGSGTDFTLTISSLEPEDFAVYYCQQWSFNPYTFGQGTKVEIK (SEQ |
| | ID NO: 264) |
| 7F8V1-39 | DIQMTQSPSSLSASVGDRVTITCSASSSVSYMYWYQQKPGKAPKLLIYLTSILA |
| | SGVPSRFSGSGSGTDFTLTISSLQPEDFATYYCQQWSFNPYTFGQGTKVEIK |
| | (SEQ ID NO: 265) |
| 7F8V1-5 | DIQMTQSPSTLSASVGDRVTITCSASSSVSYMYWYQQKPGKAPKLLIYLTSILA |
| | SGVPSRFSGSGSGTEFTLTISSLQPDDFATYYCQQWSFNPYTFGQGTKVEIK |
| | (SEQ ID NO: 266) |
| 7F8V3-15 | EIVMTQSPATLSVSPGERATLSCSASSSVSYMYWYQQKPGQAPRLLIYLTSILA |
| | SGIPARFSGSGSGTEFTLTISSLQSEDFAVYYCQQWSFNPYTFGQGTKVEIK |
| | (SEQ ID NO: 267) |
| 7F8V1-9 | DIQLTQSPSFLSASVGDRVTITCSASSSVSYMYWYQQKPGKAPKLLIYLTSILAS |
| | GVPSRFSGSGSGTEFTLTISSLQPEDFATYYCQQWSFNPYTFGQGTKVEIK (SEQ |
| | ID NO: 268) |
| 7F8V1-33 | DIQMTQSPSSLSASVGDRVTITCSASSSVSYMYWYQQKPGKAPKLLIYLTSILA |
| | SGVPSRFSGSGSGTDFTFTISSLQPEDIATYYCQQWSFNPYTFGQGTKVEIK |
| | (SEQ ID NO: 269) |
| 7F8V3-20 | EIVLTQSPGTLSLSPGERATLSCSASSSVSYMYWYQQKPGQAPRLLIYLTSILAS |
| | GIPDRFSGSGSGTDFTLTISRLEPEDFAVYYCQQWSFNPYTFGQGTKVEIK (SEQ |
| | ID NO: 270) |
| 7F8V2-28 | DIVMTQSPLSLPVTPGEPASISCSASSSVSYMYWYLQKPGQSPQLLIYLTSILAS |
| | GVPDRFSGSGSGTDFTLKISRVEAEDVGVYYCQQWSFNPYTFGQGTKVEIK |
| | (SEQ ID NO: 271) |
| 7F8V2-30 | DVVMTQSPLSLPVTLGQPASISCSASSSVSYMYWFQQRPGQSPRRLIYLTSILAS |
| | GVPDRFSGSGSGTDFTLKISRVEAEDVGVYYCQQWSFNPYTFGQGTKVEIK |
| | (SEQ ID NO: 272) |
| 7F8V4-1 | DIVMTQSPDSLAVSLGERATINCSASSSVSYMYWYQQKPGQPPKLLIYLTSILA |
| | SGVPDRFSGSGSGTDFTLTISSLQAEDVAVYYCQQWSFNPYTFGQGTKVEIK |
| | (SEQ ID NO: 273) |
| Antibody 8F8 | Antibody 8F8 |
| 8F8V2-30 | DVVMTQSPLSLPVTLGQPASISCRSSQSLVHSNGNTYLHWFQQRPGQSPRRLIY |
| | KVSNRFSGVPDRFSGSGSGTDFTLKISRVEAEDVGVYYCSQSTHVPLTFGQGT |
| | KVEIK (SEQ ID NO: 275) |
| 8F8V2-28 | DIVMTQSPLSLPVTPGEPASISCRSSQSLVHSNGNTYLHWYLQKPGQSPQLLIY |
| | KVSNRFSGVPDRFSGSGSGTDFTLKISRVEAEDVGVYYCSQSTHVPLTFGQGT |
| | KVEIK (SEQ ID NO: 276) |
| 8F8V4-1 | DIVMTQSPDSLAVSLGERATINCRSSQSLVHSNGNTYLHWYQQKPGQPPKLLI |
| | YKVSNRFSGVPDRFSGSGSGTDFTLTISSLQAEDVAVYYCSQSTHVPLTFGQGT |
| | KVEIK (SEQ ID NO: 277) |
| 8F8V3-11 | EIVLTQSPATLSLSPGERATLSCRSSQSLVHSNGNTYLHWYQQKPGQAPRLLIY |
| | KVSNRFSGIPARFSGSGSGTDFTLTISSLEPEDFAVYYCSQSTHVPLTFGQGTKV |
| | EIK (SEQ ID NO: 278) |
| 8F8V1-39 | DIQMTQSPSSLSASVGDRVTITCRSSQSLVHSNGNTYLHWYQQKPGKAPKLLI |
| | YKVSNRFSGVPSRFSGSGSGTDFTLTISSLQPEDFATYYCSQSTHVPLTFGQGT |
| | KVEIK (SEQ ID NO: 279) |
| 8F8V1-33 | DIQMTQSPSSLSASVGDRVTITCRSSQSLVHSNGNTYLHWYQQKPGKAPKLLI |
| | YKVSNRFSGVPSRFSGSGSGTDFTFTISSLQPEDIATYYCSQSTHVPLTFGQGTK |
| | VEIK (SEQ ID NO: 280) |
| 8F8V3-15 | EIVMTQSPATLSVSPGERATLSCRSSQSLVHSNGNTYLHWYQQKPGQAPRLLI |
| | YKVSNRFSGIPARFSGSGSGTEFTLTISSLQSEDFAVYYCSQSTHVPLTFGQGTK |
| | VEIK (SEQ ID NO: 281) |
| 8F8V1-5 | DIQMTQSPSTLSASVGDRVTITCRSSQSLVHSNGNTYLHWYQQKPGKAPKLLI |
| | YKVSNRFSGVPSRFSGSGSGFEFTLTISSLQPDDFATYYCSQSTHVPLTFGQGT |
| | KVEIK (SEQ ID NO: 282) |
| 8F8V1-9 | DIQLTQSPSELSASVGDRVTITCRSSQSLVHSNGNTYLHWYQQKPGKAPKLLIY |
| | KVSNRFSGVPSRFSGSGSGTEFTLTISSLQPEDFATYYCSQSTHVPLTFGQGTKV |
| | EIK (SEQ ID NO: 283) |
| 8F8V3-20 | EIVLTQSPGTLSLSPGERATLSCRSSQSLVHSNGNTYLHWYQQKPGQAPRLLIY |
| | KVSNRFSGIPDRFSGSGSGTDFTLTISRLEPEDFAVYYCSQSTHVPLTFGQGTKV |
| | EIK (SEQ ID NO: 284) |
| Antibody1H7 | Antibody 1H7 |
| 1H7V1-39 | DIQMTQSPSSLSASVGDRVTITCSASSSVSYMYWYQQKPGKAPKLLIYLTSILA |
| | SGVPSRFSGSGSGTDFTLTISSLQPEDFATYYCQQWSFNPYTFGQGTKVEIK |
| | (SEQ ID NO: 265) |
| 1H7V3-11 | EIVLTQSPATLSLSPGERATLSCSASSSVSYMYWYQQKPGQAPRLLIYLTSILAS |
| | GIPARFSGSGSGTDFTLTISSLEPEDFAVYYCQQWSFNPYTFGQGTKVEIK (SEQ |
| | ID NO: 264) |
| 1H7V1-5 | DIQMTQSPSTLSASVGDRVTITCSASSSVSYMYWYQQKPGKAPKLLIYLTSILA |
| | SGVPSRFSGSGSGTEFTLTISSLQPDDFATYYCQQWSFNPYTFGQGTKVEIK |
| | (SEQ ID NO: 266) |
| 1H7V1-9 | DIQLTQSPSELSASVGDRVTITCSASSSVSYMYWYQQKPGKAPKLLIYLTSILAS |
| | GVPSRFSGSGSGTEFTLTISSLQPEDFATYYCQQWSFNPYTFGQGTKVEIK (SEQ |
| | ID NO: 268) |
| 1H7V3-15 | EIVMTQSPATLSVSPGERATLSCSASSSVSYMYWYQQKPGQAPRLLIYLTSILA |
| | SGIPARFSGSGSGTEFTLTISSLQSEDFAVYYCQQWSFNPYTFGQGTKVEIK |
| | (SEQ ID NO: 267) |
| 1H7V1-33 | DIQMTQSPSSLSASVGDRVTITCSASSSVSYMYWYQQKPGKAPKLLIYLTSILA |
| | SGVPSRFSGSGSGTDFTFTISSLQPEDIATYYCQQWSFNPYTFGQGTKVEIK |
| | (SEQ ID NO: 269) |
| 1H7V3-20 | EIVLTQSPGTLSLSPGERATLSCSASSSVSYMYWYQQKPGQAPRLLIYLTSILAS |
| | GIPDRFSGSGSGTDFTLTISRLEPEDFAVYYCQQWSFNPYTFGQGTKVEIK (SEQ |
| | ID NO: 270) |
| 1H7V2-28 | DIVMTQSPLSLPVTPGEPASISCSASSSVSYMYWYLQKPGQSPQLLIYLTSILAS |
| | GVPDRFSGSGSGTDFTLKISRVEAEDVGVYYCQQWSFNPYTFGQGTKVEIK |
| | (SEQ ID NO: 271) |
| 1H7V2-30 | DVVMTQSPLSLPVTLGQPASISCSASSSVSYMYWFQQRPGQSPRRLIYLTSILAS |
| | GVPDRFSGSGSGTDFTLKISRVEAEDVGVYYCQQWSFNPYTFGQGTKVEIK |
| | (SEQ ID NO: 272) |
| 1H7V4-1 | DIVMTQSPDSLAVSLGERATINCSASSSVSYMYWYQQKPGQPPKLLIYLTSILA |
| | SGVPDRFSGSGSGTDFTLTISSLQAEDVAVYYCQQWSFNPYTFGQGTKVEIK |
| | (SEQ ID NO: 273) |
| Antibody 2H8 | Antibody 2H8 |
| 2H8V3-11 | EIVLTQSPATLSLSPGERATLSCSASSSVSYMYWYQQKPGQAPRLLIYLTSILAS |
| | GIPARFSGSGSGTDFTLTISSLEPEDFAVYYCQQWSFNPYTFGQGTKVEIK (SEQ |
| | ID NO: 264) |
| 2H8V1-39 | DIQMTQSPSSLSASVGDRVTITCSASSSVSYMYWYQQKPGKAPKLLIYLTSILA |
| | SGVPSRFSGSGSGTDFTLTISSLQPEDFATYYCQQWSFNPYTFGQGTKVEIK |
| | (SEQ ID NO: 265) |
| 2H8V1-5 | DIQMTQSPSTLSASVGDRVTITCSASSSVSYMYWYQQKPGKAPKLLIYLTSILA |
| | SGVPSRFSGSGSGTEFTLTISSLQPDDFATYYCQQWSFNPYTFGQGTKVEIK |
| | (SEQ ID NO: 266) |
| 2H8V3-15 | EIVMTQSPATLSVSPGERATLSCSASSSVSYMYWYQQKPGQAPRLLIYLTSILA |
| | SGIPARFSGSGSGTEFTLTISSLQSEDFAVYYCQQWSFNPYTFGQGTKVEIK |
| | (SEQ ID NO: 267) |
| 2H8V1-9 | DIQLTQSPSELSASVGDRVTITCSASSSVSYMYWYQQKPGKAPKLLIYLTSILAS |
| | GVPSRFSGSGSGTEFTLTISSLQPEDFATYYCQQWSFNPYTFGQGTKVEIK (SEQ |
| | ID NO: 268) |
| 2H8V1-33 | DIQMTQSPSSLSASVGDRVTITCSASSSVSYMYWYQQKPGKAPKLLIYLTSILA |
| | SGVPSRFSGSGSGTDFTFTISSLQPEDIATYYCQQWSFNPYTFGQGTKVEIK |
| | (SEQ ID NO: 269) |
| 2H8V3-20 | EIVLTQSPGTLSLSPGERATLSCSASSSVSYMYWYQQKPGQAPRLLIYLTSILAS |
| | GIPDRFSGSGSGTDFTLTISRLEPEDFAVYYCQQWSFNPYTFGQGTKVEIK (SEQ |
| | ID NO: 270) |
| 2H8V2-28 | DIVMTQSPLSLPVTPGEPASISCSASSSVSYMYWYLQKPGQSPQLLIYLTSILAS |
| | GVPDRFSGSGSGTDFTLKISRVEAEDVGVYYCQQWSFNPYTFGQGTKVEIK |
| | (SEQ ID NO: 271) |
| 2H8V2-30 | DVVMTQSPLSLPVTLGQPASISCSASSSVSYMYWFQQRPGQSPRRLIYLTSILAS |
| | GVPDRFSGSGSGTDFTLKISRVEAEDVGVYYCQQWSFNPYTFGQGTKVEIK |
| | (SEQ ID NO: 272) |
| 2H8V4-1 | DIVMTQSPDSLAVSLGERATINCSASSSVSYMYWYQQKPGQPPKLLIYLTSILA |
| | SGVPDRFSGSGSGTDFTLTISSLQAEDVAVYYCQQWSFNPYTFGQGTKVEIK |
| | (SEQ ID NO: 273) |
| Antibody 3A2 | Antibody 3A2 |
| 3A2 V2-30 | DVVMTQSPLSLPVTLGQPASISCRSSQTIIHSNGNTYLEWFQQRPGQSPRRLIY |
| | KVSNRFSGVPDRFSGSGSGTDFTLKISRVEAEDVGVYYCFQGSHVPYTFGQGT |
| | KVEIK (SEQ ID NO: 288) |
| 3A2 V2-28 | DIVMTQSPLSLPVTPGEPASISCRSSQTIIHSNGNTYLEWYLQKPGQSPQLLIYK |
| | VSNRFSGVPDRFSGSGSGTDFTLKISRVEAEDVGVYYCFQGSHVPYTFGQGTK |
| | VEIK (SEQ ID NO: 289) |
| 3A2 V4-1 | DIVMTQSPDSLAVSLGERATINCRSSQTIIHSNGNTYLEWYQQKPGQPPKLLIY |
| | KVSNRFSGVPDRFSGSGSGTDFTLTISSLQAEDVAVYYCFQGSHVPYTFGQGT |
| | KVEIK (SEQ ID NO: 290) |
| 3A2 V3-11 | EIVLTQSPATLSLSPGERATLSCRSSQTIIHSNGNTYLEWYQQKPGQAPRLLIYK |
| | VSNRFSGIPARFSGSGSGTDFTLTISSLEPEDFAVYYCFQGSHVPYTFGQGTKVE |
| | IK (SEQ ID NO: 291) |
| 3A2 V1-9 | DIQLTQSPSFLSASVGDRVTITCRSSQTIIHSNGNTYLEWYQQKPGKAPKLLIY |
| | KVSNRFSGVPSRFSGSGSGTEFTLTISSLQPEDFATYYCFQGSHVPYTFGQGTK |
| | VEIK (SEQ ID NO: 292) |
| 3A2 V1-33 | DIQMTQSPSSLSASVGDRVTITCRSSQTIIHSNGNTYLEWYQQKPGKAPKLLIY |
| | KVSNRFSGVPSRFSGSGSGTDFTFTISSLQPEDIATYYCFQGSHVPYTFGQGTK |
| | VEIK (SEQ ID NO: 293) |
| 3A2 V1-39 | DIQMTQSPSSLSASVGDRVTITCRSSQTIIHSNGNTYLEWYQQKPGKAPKLLIY |
| | KVSNRFSGVPSRFSGSGSGTDFTLTISSLQPEDFATYYCFQGSHVPYTFGQGTK |
| | VEIK (SEQ ID NO: 294) |
| 3A2 V3-15 | EIVMTQSPATLSVSPGERATLSCRSSQTIIHSNGNTYLEWYQQKPGQAPRLLIY |
| | KVSNRFSGIPARFSGSGSGFEFTLTISSLQSEDFAVYYCFQGSHVPYTFGQGTK |
| | VEIK (SEQ ID NO: 295) |
| 3A2 V1-5 | DIQMTQSSTLSASVGDRVTITCRSSQTIIHSNGNTYLEWYQQKPGKAPKLLIY |
| | KVSNRFSGVPSRFSGSGSGTEFTLTISSLQPDDFATYYCFQGSHVPYTFGQGTK |
| | VEIK (SEQ ID NO: 296) |
| 3A2 V3-20 | EIVLTQSPGTLSLSPGERATLSCRSSQTIIHSNGNTYLEWYQQKPGQAPRLLIYK |
| | VSNRFSGIPDRFSGSGSGTDFTLTISRLEPEDFAVYYCFQGSHVPYTFGQGTKV |
| | EIK (SEQ ID NO: 297) |
| Antibody 3A7 | Antibody 3A7 |
| 3A7 V2-30 | DVVMTQSPLSLPVTLGQPASISCKSSQSLLYSNGKTFLSWFQQRPGQSPRRLIY |
| | LVSKLDSGVPDRFSGSGSGTDFTLKISRVEAEDVGVYYCMQGTHFPLTFGQGT |
| | KVEIK (SEQ ID NO: 242) |
| 3A7 V2-28 | DIVMTQSPLSLPVTPGEPASISCKSSQSLLYSNGKTFLSWYLQKPGQSPQLLIYL |
| | VSKLDSGVPDRFSGSGSGTDFTLKISRVEAEDVGVYYCMQGTHFPLTFGQGT |
| | KVEIK (SEQ ID NO: 243) |
| 3A7 V4-1 | DIVMTQSPDSLAVSLGERATINCKSSQSLLYSNGKTFLSWYQQKPGQPPKLLIY |
| | LVSKLDSGVPDRFSGSGSGTDFTLTISSLQAEDVAVYYCMQGTHFPLTFGQGT |
| | KVEIK (SEQ ID NO: 244) |
| 3A7 V1-39 | DIQMTQSPSSLSASVGDRVTITCKSSQSLLYSNGKTFLSWYQQKPGKAPKLLIY |
| | LVSKLDSGVPSRFSGSGSGTDFTLTISSLQPEDFATYYCMQGTHFPLTFGQGTK |
| | VEIK (SEQ ID NO: 247) |
| 3A7 V1-9 | DIQLTQSPSFLSASVGDRVTITCKSSQSLLYSNGKTFLSWYQQKPGKAPKLLIY |
| | LVSKLDSGVPSRFSGSGSGTEFTLTISSLQPEDFATYYCMQGTHFPLTFGQGTK |
| | VEIK (SEQ ID NO: 246) |
| 3A7 V1-5 | DIQMTQSPSTLSASVGDRVTITCKSSQSLLYSNGKTFLSWYQQKPGKAPKLLIY |
| | LVSKLDSGVPSRFSGSGSGTEFTLTISSLQPDDFATYYCMQGTHFPLTFGQGTK |
| | VEIK (SEQ ID NO: 245) |
| 3A7 V1-33 | DIQMTQSPSSLSASVGDRVTITCKSSQSLLYSNGKTFLSWYQQKPGKAPKLLIY |
| | LVSKLDSGVPSRFSGSGSGTDFTFTISSLQPEDIATYYCMQGTHFPLTFGQGTK |
| | VEIK (SEQ ID NO: 248) |
| 3A7 V3-15 | EIVMTQSPATLSVSPGERATLSCKSSQSLLYSNGKTFLSWYQQKPGQAPRLLIY |
| | LVSKLDSGIPARFSGSGSGTEFTLTISSLQSEDFAVYYCMQGTHFPLTFGQGTK |
| | VEIK (SEQ ID NO: 249) |
| 3A7 V3-11 | EIVLTQSPATLSLSPGERATLSCKSSQSLLYSNGKTFLSWYQQKPGQAPRLLIY |
| | LVSKLDSGIPARFSGSGSGTDFTLTISSLEPEDFAVYYCMQGTHFPLTFGQGTK |
| | VEIK (SEQ ID NO: 250) |
| 3A7 V3-20 | EIVLTQSPGTLSLSPGERATLSCKSSQSLLYSNGKTFLSWYQQKPGQAPRLLIY |
| | LVSKLDSGIPDRFSGSGSGTDFTLTISRLEPEDFAVYYCMQGTHFPLTFGQGTK |
| | VEIK (SEQ ID NO: 251) |
| Antibody 3B10 | Antibody 3B10 |
| 3B10V4-1 | DIVMTQSPDSLAVSLGERATINCKSSQSLLYSSDQKNYLAWYQQKPGQPPKLL |
| | IYWASTRESGVPDRFSGSGSGTDFTLTISSLQAEDVAVYYCQQYYSYPLTFGQ |
| | GTKVEIK (SEQ ID NO: 300) |
| 3B10V2-28 | DIVMTQSPLSLPVTPGEPASISCKSSQSLLYSSDQKNYLAWYLQKPGQSPQLLI |
| | YWASTRESGVPDRFSGSGSGTDFTLKISRVEAEDVGVYYCQQYYSYPLTFGQ |
| | GTKVEIK (SEQ ID NO: 301) |
| 3B10V2-30 | DVVMTQSPLSLPVTLGQPASISCKSSQSLLYSSDQKNYLAWFQQRPGQSPRRLI |
| | YWASTRESGVPDRFSGSGSGTDFTLKISRVEAEDVGVYYCQQYYSYPLTFGQ |
| | GTKVEIK (SEQ ID NO: 302) |
| 3B10V1-5 | DIQMTQSPSTLSASVGDRVTITCKSSQSLLYSSDQKNYLAWYQQKPGKAPKLL |
| | IYWASTRESGVPSRFSGSGSGTEFTLTISSLQPDDFATYYCQQYYSYPLTFGQG |
| | TKVEIK (SEQ ID NO: 303) |
| 3B10V1-9 | DIQLTQSPSFLSASVGDRVTITCKSSQSLLYSSDQKNYLAWYQQKPGKAPKLLI |
| | YWASTRESGVPSRFSGSGSGTEFTLTISSLQPEDFATYYCQQYYSYPLTFGQGT |
| | KVEIK (SEQ ID NO: 304) |
| 3B10V3-15 | EIVMTQSPATLSVSPGERATLSCKSSQSLLYSSDQKNYLAWYQQKPGQAPRLLI |
| | YWASTRESGIPARFSGSGSGTEFTLTISSLQSEDFAVYYCQQYYSYPLTFGQGT |
| | KVEIK (SEQ ID NO: 305) |
| 3B10V1-39 | DIQMTQSPSSLSASVGDRVTITCKSSQSLLYSSDQKNYLAWYQQKPGKAPKLLI |
| | YWASTRESGVPSRFSGSGSGTDFTLTISSLQPEDFATYYCQQYYSYPLTFGQGT |
| | KVEIK (SEQ ID NO: 306) |
| 3B10V3-11 | EIVLTQSPATLSLSPGERATLSCKSSQSLLYSSDQKNYLAWYQQKPGQAPRLLI |
| | YWASTRESGIPARFSGSGSGTDFTLTISSLEPEDFAVYYCQQYYSYPLTFGQGT |
| | KVEIK (SEQ ID NO: 307) |
| 3B10V1-33 | DIQMTQSPSSLSASVGDRVTITCKSSQSLLYSSDQKNYLAWYQQKPGKAPKLLI |
| | YWASTRESGVPSRFSGSGSGTDFTFTISSLQPEDIATYYCQQYYSYPLTFGQGT |
| | KVEIK (SEQ ID NO: 308) |
| 3B10V3-20 | EIVLTQSPGTLSLSPGERATLSCKSSQSLLYSSDQKNYLAWYQQKPGQAPRLLI |
| | YWASTRESGIPDRFSGSGSGTDFTLTISRLEPEDFAVYYCQQYYSYPLTFGQGT |
| | KVEIK (SEQ ID NO: 309) |
| Antibody 4F11 | Antibody 4F11 |
| 4F11V2-30 | DVVMTQSPLSLPVTLGQPASISCRSSQTIIHSNGNTYLEWFQQRPGQSPRRLIY |
| | KVSNRFSGVPDRFSGSGSGTDFTLKISRVEAEDVGVYYCFQGSHVPYTFGQGT |
| | KVEIK (SEQ ID NO: 288) |
| 4F11V2-28 | DIVMTQSPLSLPVTPGEPASISCRSSQTIIHSNGNTYLEWYLQKPGQSPQLLIYK |
| | VSNRFSGVPDRFSGSGSGTDFTLKISRVEAEDVGVYYCFQGSHVPYTFGQGTK |
| | VEIK (SEQ ID NO: 289) |
| 4F11V4-1 | DIVMTQSPDSLAVSLGERATINCRSSQTIIHSNGNTYLEWYQQKPGQPPKLLIY |
| | KVSNRFSGVPDRFSGSGSGTDFTLTISSLQAEDVAVYYCFQGSHVPYTFGQGT |
| | KVEIK (SEQ ID NO: 290) |
| 4F11V3-11 | EIVLTQSPATLSLSPGERATLSCRSSQTIIHSNGNTYLEWYQQKPGQAPRLLIYK |
| | VSNRFSGIPARFSGSGSGTDFTLTISSLEPEDFAVYYCFQGSHVPYTFGQGTKVE |
| | IK (SEQ ID NO: 291) |
| 4F11V3-15 | EIVMTQSPATLSVSPGERATLSCRSSQTIIHSNGNTYLEWYQQKPGQAPRLLIY |
| | KVSNRFSGIPARFSGSGSGTEFTLTISSLQSEDFAVYYCFQGSHVPYTFGQGTK |
| | VEIK (SEQ ID NO: 295) |
| 4F11V1-33 | DIQMTQSPSSLSASVGDRVTITCRSSQTIIHSNGNTYLEWYQQKPGKAPKLLIY |
| | KVSNRFSGVPSRFSGSGSGTDFTFTISSLQPEDIATYYCFQGSHVPYTFGQGTK |
| | VEIK (SEQ ID NO: 293) |
| 4F11V1-39 | DIQMTQSPSSLSASVGDRVTITCRSSQTIIHSNGNTYLEWYQQKPGKAPKLLIY |
| | KVSNRFSGVPSRFSGSGSGTDFTLTISSLQPEDFATYYCFQGSHVPYTFGQGTK |
| | VEIK (SEQ ID NO: 294) |
| 4F11V1-9 | DIQLTQSPSFLSASVGDRVTITCRSSQTIIHSNGNTYLEWYQQKPGKAPKLLIY |
| | KVSNRFSGVPSRFSGSGSGTEFTLTISSLQPEDFATYYCFQGSHVPYTFGQGTK |
| | VEIK (SEQ ID NO: 292) |
| 4F11V1-5 | DIQMTQSPSTLSASVGDRVTITCRSSQTIIHSNGNTYLEWYQQKPGKAPKLLIY |
| | KVSNRFSGVPSRFSGSGSGTEFTLTISSLQPDDFATYYCFQGSHVPYTFGQGTK |
| | VEIK (SEQ ID NO: 296) |
| 4F11V3-20 | EIVLTQSPGTLSLSPGERATLSCRSSQTIIHSNGNTYLEWYQQKPGQAPRLLIYK |
| | VSNRFSGIPDRFSGSGSGTDFTLTISRLEPEDFAVYYCFQGSHVPYTFGQGTKV |
| | EIK (SEQ ID NO: 297) |
| Antibody 6H6 | Antibody 6H6 |
| 6H6V4-1 | DIVMTQSPDSLAVSLGERATINCKSSQSVFYSSNQKNYLAWYQQKPGQPPKLL |
| | IYWASTRESGVPDRFSGSGSGTDFTLTISSLQAEDVAVYYCHQYLSSLTFGQGT |
| | KVEIK (SEQ ID NO: 680) |
| 6H6V2-28 | DIVMTQSPLSLPVTPGEPASISCKSSQSVFYSSNQKNYLAWYLQKPGQSPQLLI |
| | YWASTRESGVPDRFSGSGSGTDFTLKISRVEAEDVGVYYCHQYLSSLTFGQGT |
| | KVEIK (SEQ ID NO: 681) |
| 6H6V2-30 | DVVMTQSPLSLPVTLGQPASISCKSSQSVFYSSNQKNYLAWFQQRPGQSPRRLI |
| | YWASTRESGVPDRFSGSGSGTDFTLKISRVEAEDVGVYYCHQYLSSLTFGQGT |
| | KVEIK (SEQ ID NO: 682) |
| 6H6V1-5 | DIQMTQSPSTLSASVGDRVTITCKSSQSVFYSSNQKNYLAWYQQKPGKAPKLL |
| | IYWASTRESGVPSRFSGSGSGTEFTLTISSLQPDDFATYYCHQYLSSLTFGQGT |
| | KVEIK (SEQ ID NO: 683) |
| 6H6V1-9 | DIQLTQSPSFLSASVGDRVTITCKSSQSVFYSSNQKNYLAWYQQKPGKAPKLLI |
| | YWASTRESGVPSRFSGSGSGTEFTLTISSLQPEDFATYYCHQYLSSLTFGQGTK |
| | VEIK (SEQ ID NO: 684) |
| 6H6V3-15 | EIVMTQSPATLSVSPGERATLSCKSSQSVFYSSNQKNYLAWYQQKPGQAPRLLI |
| | YWASTRESGIPARFSGSGSGTEFTLTISSLQSEDFAVYYCHQYLSSLTFGQGTK |
| | VEIK (SEQ ID NO: 685) |
| 6H6V1-33 | DIQMTQSPSSLSASVGDRVTITCKSSQSVFYSSNQKNYLAWYQQKPGKAPKLLI |
| | YWASTRESGVPSRFSGSGSGTDFTFTISSLQPEDIATYYCHQYLSSLTFGQGTK |
| | VEIK (SEQ ID NO: 686) |
| 6H6V3-11 | EIVLTQ SPATLSLSPGERATLSCKSSQSVFYSSNQKNYLAWYQQKPGQAPRLLI |
| | YWASTRESGIPARFSGSGSGTDFTLTISSLEPEDFAVYYCHQYLSSLTFGQGTK |
| | VEIK (SEQ ID NO: 687) |
| 6H6V1-39 | DIQMTQSPSSLSASVGDRVTITCKSSQSVFYSSNQKNYLAWYQQKPGKAPKLLI |
| | YWASTRESGVPSRFSGSGSGTDFTLTISSLQPEDFATYYCHQYLSSLTFGQGTK |
| | VEIK (SEQ ID NO: 688) |
| 6H6V3-20 | EIVLTQ SPGTLSLSPGERATLSCKSSQSVFYSSNQKNYLAWYQQKPGQAPRLLI |
| | YWASTRESGIPDRFSGSGSGTDFTLTISRLEPEDFAVYYCHQYLSSLTFGQGTK |
| | VEIK (SEQ ID NO: 689) |
| Antibody 7A9 | Antibody 7A9 |
| 7A9V1-9 | DIQLTQSPSFLSASVGDRVTITCRASENIYSYLAWYQQKPGKAPKLLIYKAKTL |
| | AEGVPSRFSGSGSGTEFTLTISSLQPEDFATYYCQHHYGTPFTFGQGTKVEIK |
| | (SEQ ID NO: 312) |
| 7A9V3-11 | EIVLTQSPATLSLSPGERATLSCRASENIYSYLAWYQQKPGQAPRLLIYKAKTL |
| | AEGIPARFSGSGSGTDFTLTISSLEPEDFAVYYCQHHYGTPFTFGQGTKVEIK |
| | (SEQ ID NO: 313) |
| 7A9V1-5 | DIQMTQSPSTLSASVGDRVTITCRASENIYSYLAWYQQKPGKAPKLLIYKAKT |
| | LAEGVPSRFSGSGSGTEFTLTISSLQPDDFATYYCQHHYGTPFTFGQGTKVEIK |
| | (SEQ ID NO: 314) |
| 7A9V3-15 | EIVMTQSPATLSVSPGERATLSCRASENIYSYLAWYQQKPGQAPRLLIYKAKTL |
| | AEGIPARFSGSGSGTEFTLTISSLQSEDFAVYYCQHHYGTPFTFGQGTKVEIK |
| | (SEQ ID NO: 315) |
| 7A9V1-39 | DIQMTQSPSSLSASVGDRVTITCRASENIYSYLAWYQQKPGKAPKLLIYKAKTL |
| | AEGVPSRFSGSGSGTDFTLTISSLQPEDFATYYCQHHYGTPFTFGQGTKVEIK |
| | (SEQ ID NO: 316) |
| 7A9V1-33 | DIQMTQSPSSLSASVGDRVTITCRASENIYSYLAWYQQKPGKAPKLLIYKAKTL |
| | AEGVPSRFSGSGSGTDFTFTISSLQPEDIATYYCQHHYGTPFTFGQGTKVEIK |
| | (SEQ ID NO: 317) |
| 7A9V3-20 | EIVLTQSPGTLSLSPGERATLSCRASENIYSYLAWYQQKPGQAPRLLIYKAKTL |
| | AEGIPDRFSGSGSGTDFTLTISRLEPEDFAVYYCQHHYGTPFTFGQGTKVEIK |
| | (SEQ ID NO: 318) |
| 7A9V2-28 | DIVMTQSPLSLPVTPGEPASISCRASENIYSYLAWYLQKPGQSPQLLIYKAKTL |
| | AEGVPDRFSGSGSGTDFTLKISRVEAEDVGVYYCQHHYGTPFTFGQGTKVEIK |
| | (SEQ ID NO: 319) |
| 7A9V4-1 | DIVMTQSPDSLAVSLGERATINCRASENIYSYLAWYQQKPGQPPKLLIYKAKT |
| | LAEGVPDRFSGSGSGTDFTLTISSLQAEDVAVYYCQHHYGTPFTFGQGTKVEI |
| | K (SEQ ID NO: 320) |
| 7A9V2-30 | DVVMTQSPLSLPVTLGQPASISCRASENIYSYLAWFQQRPGQSPRRLIYKAKTL |
| | AEGVPDRFSGSGSGTDFTLKISRVEAEDVGVYYCQHHYGTPFTFGQGTKVEIK |
| | (SEQ ID NO: 321) |
| Antibody 8A1 | Antibody 8A1 |
| 8A1V3-15 | EIVMTQSPATLSVSPGERATLSCRTSENVYSNLAWYQQKPGQAPRLLIYAATN |
| | LADGIPARFSGSGSGTEFTLTISSLQSEDFAVYYCHHFWGTPYTFGQGTKVEIK |
| | (SEQ ID NO: 323) |
| 8A1V3-11 | EIVLTQSPATLSLSPGERATLSCRTSENVYSNLAWYQQKPGQAPRLLIYAATNL |
| | ADGIPARFSGSGSGTDFTLTISSLEPEDFAVYYCHHFWGTPYTFGQGTKVEIK |
| | (SEQ ID NO: 324) |
| 8A1V1-9 | DIQLTQSPSELSASVGDRVTITCRTSENVYSNLAWYQQKPGKAPKLLIYAATNL |
| | ADGVPSRFSGSGSGTEFTLTISSLQPEDFATYYCHHFWGTPYTFGQGTKVEIK |
| | (SEQ ID NO: 325) |
| 8A1V1-5 | DIQMTQSPSTLSASVGDRVTITCRTSENVYSNLAWYQQKPGKAPKLLIYAATN |
| | LADGVPSRFSGSGSGTEFTLTISSLQPDDFATYYCHHFWGTPYTFGQGTKVEIK |
| | (SEQ ID NO: 326) |
| 8A1V1-39 | DIQMTQSPSSLSASVGDRVTITCRTSENVYSNLAWYQQKPGKAPKLLIYAATN |
| | LADGVPSRFSGSGSGTDFTLTISSLQPEDFATYYCHHFWGTPYTFGQGTKVEIK |
| | (SEQ ID NO: 327) |
| 8A1V1-33 | DIQMTQSPSSLSASVGDRVTITCRTSENVYSNLAWYQQKPGKAPKLLIYAATN |
| | LADGVPSRFSGSGSGTDFTFTISSLQPEDIATYYCHHFWGTPYTFGQGTKVEIK |
| | (SEQ ID NO: 328) |
| 8A1V3-20 | EIVLTQSPGTLSLSPGERATLSCRTSENVYSNLAWYQQKPGQAPRLLIYAATNL |
| | ADGIPDRFSGSGSGTDFTLTISRLEPEDFAVYYCHHFWGTPYTFGQGTKVEIK |
| | (SEQ ID NO: 329) |
| 8A1V2-28 | DIVMTQSPLSLPVTPGEPASISCRTSENVYSNLAWYLQKPGQSPQLLIYAATNL |
| | ADGVPDRFSGSGSGTDFTLKISRVEAEDVGVYYCHHFWGTPYTFGQGTKVEIK |
| | (SEQ ID NO: 330) |
| 8A1V2-30 | DVVMTQSPLSLPVTLGQPASISCRTSENVYSNLAWFQQRPGQSPRRLIYAATNL |
| | ADGVPDRFSGSGSGTDFTLKISRVEAEDVGVYYCHHFWGTPYTFGQGTKVEIK |
| | (SEQ ID NO: 331) |
| 8A1V4-1 | DIVMTQSPDSLAVSLGERATINCRTSENVYSNLAWYQQKPGQPPKLLIYAATN |
| | LADGVPDRFSGSGSGTDFTLTISSLQAEDVAVYYCHHFWGTPYTFGQGTKVEI |
| | K (SEQ ID NO: 332) |
| Antibody 9F5 | Antibody 9F5 |
| 9F5V2-30 | DVVMTQSPLSLPVTLGQPASISCRSSQSLVHSNGYTYLHWFQQRPGQSPRRLIY |
| | KVSNRFSGVPDRFSGSGSGTDFTLKISRVEAEDVGVYYCSQSTRVPYTFGQGT |
| | KVEIK (SEQ ID NO: 334) |
| 9F5V2-28 | DIVMTQSPLSLPVTPGEPASISCRSSQSLVHSNGYTYLHWYLQKPGQSPQLLIY |
| | KVSNRFSGVPDRFSGSGSGTDFTLKISRVEAEDVGVYYCSQSTRVPYTFGQGT |
| | KVEIK (SEQ ID NO: 335) |
| 9F5V4-1 | DIVMTQSPDSLAVSLGERATINCRSSQSLVHSNGYTYLHWYQQKPGQPPKLLI |
| | YKVSNRFSGVPDRFSGSGSGTDFTLTISSLQAEDVAVYYCSQSTRVPYTFGQGT |
| | KVEIK (SEQ ID NO: 336) |
| 9F5V3-11 | EIVLTQSPATLSLSPGERATLSCRSSQSLVHSNGYTYLHWYQQKPGQAPRLLIY |
| | KVSNRFSGIPARFSGSGSGTDFTLTISSLEPEDFAVYYCSQSTRVPYTFGQGTKV |
| | EIK (SEQ ID NO: 337) |
| 9F5V1-33 | DIQMTQSPSSLSASVGDRVTITCRSSQSLVHSNGYTYLHWYQQKPGKAPKLLI |
| | YKVSNRFSGVPSRFSGSGSGTDFTFTISSLQPEDIATYYCSQSTRVPYTFGQGTK |
| | VEIK (SEQ ID NO: 338) |
| 9F5V3-15 | EIVMTQSPATLSVSPGERATLSCRSSQSLVHSNGYTYLHWYQQKPGQAPRLLI |
| | YKVSNRFSGIPARFSGSGSGTEFTLTISSLQSEDFAVYYCSQSTRVPYTFGQGTK |
| | VEIK (SEQ ID NO: 339) |
| 9F5V1-5 | DIQMTQSPSTLSASVGDRVTITCRSSQSLVHSNGYTYLHWYQQKPGKAPKLLI |
| | YKVSNRFSGVPSRFSGSGSGTEFTLTISSLQPDDFATYYCSQSTRVPYTFGQGT |
| | KVEIK (SEQ ID NO: 340) |
| 9F5V1-39 | DIQMTQSPSSLSASVGDRVTITCRSSQSLVHSNGYTYLHWYQQKPGKAPKLLI |
| | YKVSNRFSGVPSRFSGSGSGTDFTLTISSLQPEDFATYYCSQSTRVPYTFGQGT |
| | KVEIK (SEQ ID NO: 341) |
| 9F5V1-9 | DIQLTQSPSFLSASVGDRVTITCRSSQSLVHSNGYTYLHWYQQKPGKAPKLLIY |
| | KVSNRFSGVPSRFSGSGSGTEFTLTISSLQPEDFATYYCSQSTRVPYTFGQGTKV |
| | EIK (SEQ ID NO: 342) |
| 9F5V3-20 | EIVLTQSPGTLSLSPGERATLSCRSSQSLVHSNGYTYLHWYQQKPGQAPRLLIY |
| | KVSNRFSGIPDRFSGSGSGTDFTLTISRLEPEDFAVYYCSQSTRVPYTFGQGTKV |
| | EIK (SEQ ID NO: 343) |
| 9F5-L1 | DIVMTQTPLSLSVTPGQPASISCRSSQSLVHSNGYTYLHWYLQKPGQSPQLLIY |
| | KVSNRFSGVPDRFSGSGSGTDFTLKISRVEAEDVGVYYCSQSTRVPYTFGQGT |
| | KLEIK (SEQ ID NO: 843) |
| 9F5-L2 | DVVMTQTPLSLSVTPGQPASISCRSSQSLVHSNGYTYLHWYLQKPGQSPQLLI |
| | YKVSNRFSGVPDRFSGSGSGTDFTLKISRVEAEDVGVYYCSQSTRVPYTFGQG |
| | TKLEIK (SEQ ID NO: 844) |
| Antibody 9G1 | Antibody 9G1 |
| 9G1V2-30 | DVVMTQSPLSLPVTLGQPASISCRFSQSLVHSNGNTYLHWFQQRPGQSPRRLIY |
| | KVSNRFSGVPDRFSGSGSGTDFTLKISRVEAEDVGVYYCSQSTRVPPTFGQGT |
| | KVEIK (SEQ ID NO: 345) |
| 9G1V2-28 | DIVMTQSPLSLPVTPGEPASISCRFSQSLVHSNGNTYLHWYLQKPGQSPQLLIY |
| | KVSNRFSGVPDRFSGSGSGTDFTLKISRVEAEDVGVYYCSQSTRVPPTFGQGT |
| | KVEIK (SEQ ID NO: 346) |
| 9G1V4-1 | DIVMTQSPDSLAVSLGERATINCRFSQSLVHSNGNTYLHWYQQKPGQPPKLLI |
| | YKVSNRFSGVPDRFSGSGSGTDFTLTISSLQAEDVAVYYCSQSTRVPPTFGQGT |
| | KVEIK (SEQ ID NO: 347) |
| 9G1V3-11 | EIVLTQSPATLSLSPGERATLSCRFSQSLVHSNGNTYLHWYQQKPGQAPRLLIY |
| | KVSNRFSGIPARFSGSGSGTDFTLTISSLEPEDFAVYYCSQSTRVPPTFGQGTKV |
| | EIK (SEQ ID NO: 348) |
| 9G1V3-15 | EIVMTQSPATLSVSPGERATLSCRFSQSLVHSNGNTYLHWYQQKPGQAPRLLI |
| | YKVSNRFSGIPARFSGSGSGTEFTLTISSLQSEDFAVYYCSQSTRVPPTFGQGTK |
| | VEIK (SEQ ID NO: 349) |
| 9G1V1-9 | DIQLTQSPSFLSASVGDRVTITCRFSQSLVHSNGNTYLHWYQQKPGKAPKLLIY |
| | KVSNRFSGVPSRFSGSGSGTEFTLTISSLQPEDFATYYCSQSTRVPPTFGQGTKV |
| | EIK (SEQ ID NO: 350) |
| 9G1V1-5 | DIQMTQSPSTLSASVGDRVTITCRFSQSLVHSNGNTYLHWYQQKPGKAPKLLI |
| | YKVSNRFSGVPSRFSGSGSGTEFTLTISSLQPDDFATYYCSQSTRVPPTFGQGTK |
| | VEIK (SEQ ID NO: 351) |
| 9G1V1-39 | DIQMTQSPSSLSASVGDRVTITCRFSQSLVHSNGNTYLHWYQQKPGKAPKLLI |
| | YKVSNRFSGVPSRFSGSGSGTDFTLTISSLQPEDFATYYCSQSTRVPPTFGQGTK |
| | VEIK (SEQ ID NO: 352) |
| 9G1V1-33 | DIQMTQSPSSLSASVGDRVTITCRFSQSLVHSNGNTYLHWYQQKPGKAPKLLI |
| | YKVSNRFSGVPSRFSGSGSGTDFTFTISSLQPEDIATYYCSQSTRVPPTFGQGTK |
| | VEIK (SEQ ID NO: 353) |
| 9G1V3-20 | EIVLTQSPGTLSLSPGERATLSCRFSQSLVHSNGNTYLHWYQQKPGQAPRLLIY |
| | KVSNRFSGIPDRFSGSGSGTDFTLTISRLEPEDFAVYYCSQSTRVPPTFGQGTKV |
| | EIK (SEQ ID NO: 354) |
| Antibody 9G3 | Antibody 9G3 |
| 9G3V1-33 | DIQMTQSPSSLSASVGDRVTITCKASSNVNYMSWYQQKPGKAPKLLIYFTSNL |
| | PSGVPSRFSGSGSGTDFTFTISSLQPEDIATYYCSGEVTQFTFGQGTKVEIK (SEQ |
| | ID NO: 356) |
| 9G3V1-9 | DIQLTQSPSFLSASVGDRVTITCKASSNVNYMSWYQQKPGKAPKLLIYFTSNLP |
| | SGVPSRFSGSGSGTEFTLTISSLQPEDFATYYCSGEVTQFTFGQGTKVEIK (SEQ |
| | ID NO: 357) |
| 9G3V1-39 | DIQMTQSPSSLSASVGDRVTITCKASSNVNYMSWYQQKPGKAPKLLIYFTSNL |
| | PSGVPSRFSGSGSGTDFTLTISSLQPEDFATYYCSGEVTQFTFGQGTKVEIK |
| | (SEQ ID NO: 358) |
| 9G3V3-11 | EIVLTQSPATLSLSPGERATLSCKASSNVNYMSWYQQKPGQAPRLLIYFTSNLP |
| | SGIPARFSGSGSGTDFTLTISSLEPEDFAVYYCSGEVTQFTFGQGTKVEIK (SEQ |
| | ID NO: 821) |
| 9G3V1-5 | DIQMTQSPSTLSASVGDRVTITCKASSNVNYMSWYQQKPGKAPKLLIYFTSNL |
| | PSGVPSRFSGSGSGTEFTLTISSLQPDDFATYYCSGEVTQFTFGQGTKVEIK |
| | (SEQ ID NO: 359) |
| 9G3V3-15 | EIVMTQSPATLSVSPGERATLSCKASSNVNYMSWYQQKPGQAPRLLIYFTSNL |
| | PSGIPARFSGSGSGTEFTLTISSLQSEDFAVYYCSGEVTQFTFGQGTKVEIK (SEQ |
| | ID NO: 360) |
| 9G3V3-20 | EIVLTQSPGTLSLSPGERATLSCKASSNVNYMSWYQQKPGQAPRLLIYFTSNLP |
| | SGIPDRFSGSGSGTDFTLTISRLEPEDFAVYYCSGEVTQFTFGQGTKVEIK (SEQ |
| | ID NO: 361) |
| 9G3V2-28 | DIVMTQSPLSLPVTPGEPASISCKASSNVNYMSWYLQKPGQSPQLLIYFTSNLPS |
| | GVPDRFSGSGSGTDFTLKISRVEAEDVGVYYCSGEVTQFTFGQGTKVEIK (SEQ |
| | ID NO: 362) |
| 9G3V2-30 | DVVMTQSPLSLPVTLGQPASISCKASSNVNYMSWFQQRPGQSPRRLIYFTSNLP |
| | SGVPDRFSGSGSGTDFTLKISRVEAEDVGVYYCSGEVTQFTFGQGTKVEIK |
| | (SEQ ID NO: 363) |
| 9G3V4-1 | DIVMTQSPDSLAVSLGERATINCKASSNVNYMSWYQQKPGQPPKLLIYFTSNL |
| | PSGVPDRFSGSGSGTDFTLTISSLQAEDVAVYYCSGEVTQFTFGQGTKVEIK |
| | (SEQ ID NO: 364) |
| Antibody 10A9 | Antibody 10A9 |
| 10A9V2-30 | DVVMTQSPLSLPVTLGQPASISCRSSQTIIHSNGNTYLEWFQQRPGQSPRRLIY |
| | KVSNRFCGVPDRFSGSGSGTDFTLKISRVEAEDVGVYYCFQGSHVPYTFGQGT |
| | KVEIK (SEQ ID NO: 366) |
| 10A9V2-28 | DIVMTQSPLSLPVTPGEPASISCRSSQTIIHSNGNTYLEWYLQKPGQSPQLLIYK |
| | VSNRFCGVPDRFSGSGSGTDFTLKISRVEAEDVGVYYCFQGSHVPYTFGQGTK |
| | VEIK (SEQ ID NO: 367) |
| 10A9V4-1 | DIVMTQSPDSLAVSLGERATINCRSSQTIIHSNGNTYLEWYQQKPGQPPKLLIY |
| | KVSNRFCGVPDRFSGSGSGTDFTLTISSLQAEDVAVYYCFQGSHVPYTFGQGT |
| | KVEIK (SEQ ID NO: 368) |
| 10A9V3-11 | EIVLTQSPATLSLSPGERATLSCRSSQTIIHSNGNTYLEWYQQKPGQAPRLLIYK |
| | VSNRFCGIPARFSGSGSGTDFTLTISSLEPEDFAVYYCFQGSHVPYTFGQGTKV |
| | EIK (SEQ ID NO: 369) |
| 10A9V3-15 | EIVMTQSPATLSVSPGERATLSCRSSQTIIHSNGNTYLEWYQQKPGQAPRLLIY |
| | KVSNRFCGIPARFSGSGSGTEFTLTISSLQSEDFAVYYCFQGSHVPYTFGQGTK |
| | VEIK (SEQ ID NO: 370) |
| 10A9V1-33 | DIQMTQSPSSLSASVGDRVTITCRSSQTIIHSNGNTYLEWYQQKPGKAPKLLIY |
| | KVSNRFCGVPSRFSGSGSGTDFTFTISSLQPEDIATYYCFQGSHVPYTFGQGTK |
| | VEIK (SEQ ID NO: 371) |
| 10A9V3-20 | EIVLTQ SPGTLSLSPGERATLSCRSSQTIIHSNGNTYLEWYQQKPGQAPRLLIYK |
| | VSNRFCGIPDRFSGSGSGTDFTLTISRLEPEDFAVYYCFQGSHVPYTFGQGTKV |
| | EIK (SEQ ID NO: 372) |
| 10A9V1-9 | DIQLTQSPSFLSASVGDRVTITCRSSQTIIHSNGNTYLEWYQQKPGKAPKLLIY |
| | KVSNRFCGVPSRFSGSGSGTEFTLTISSLQPEDFATYYCFQGSHVPYTFGQGTK |
| | VEIK (SEQ ID NO: 373) |
| 10A9V1-5 | DIQMTQSPSTLSASVGDRVTITCRSSQTIIHSNGNTYLEWYQQKPGKAPKLLIY |
| | KVSNRFCGVPSRFSGSGSGTEFTLTISSLQPDDFATYYCFQGSHVPYTFGQGTK |
| | VEIK (SEQ ID NO: 374) |
| 10A9V1-39 | DIQMTQSPSSLSASVGDRVTITCRSSQTIIHSNGNTYLEWYQQKPGKAPKLLIY |
| | KVSNRFCGVPSRFSGSGSGTDFTLTISSLQPEDFATYYCFQGSHVPYTFGQGTK |
| | VEIK (SEQ ID NO: 375) |
| Antibody 11A8 | Antibody 11A8 |
| 11A8V4-1 | DIVMTQSPDSLAVSLGERATINCKSSQSLLNSGNQKKYLTWYQQKPGQPPKLL |
| | IYWASTRESGVPDRFSGSGSGTDFTLTISSLQAEDVAVYYCQNDYGFPLTFGQ |
| | GTKVEIK (SEQ ID NO: 377) |
| 11A8V2-30 | DVVMTQSPLSLPVTLGQPASISCKSSQSLLNSGNQKKYLTWFQQRPGQSPRRLI |
| | YWASTRESGVPDRFSGSGSGTDFTLKISRVEAEDVGVYYCQNDYGFPLTFGQ |
| | GTKVEIK (SEQ ID NO: 378) |
| 11A8V2-28 | DIVMTQSPLSLPVTPGEPASISCKSSQSLLNSGNQKKYLTWYLQKPGQSPQLLI |
| | YWASTRESGVPDRFSGSGSGTDFTLKISRVEAEDVGVYYCQNDYGFPLTFGQ |
| | GTKVEIK (SEQ ID NO: 379) |
| 11A8V1-33 | DIQMTQSPSSLSASVGDRVTITCKSSQSLLNSGNQKKYLTWYQQKPGKAPKLL |
| | IYWASTRESGVPSRFSGSGSGTDFTFTISSLQPEDIATYYCQNDYGFPLTFGQGT |
| | KVEIK (SEQ ID NO: 380) |
| 11A8V3-11 | EIVLTQSPATLSLSPGERATLSCKSSQSLLNSGNQKKYLTWYQQKPGQAPRLLI |
| | YWASTRESGIPARFSGSGSGTDFTLTISSLEPEDFAVYYCQNDYGFPLTFGQGT |
| | KVEIK (SEQ ID NO: 381) |
| 11A8V3-15 | EIVMTQSPATLSVSPGERATLSCKSSQSLLNSGNQKKYLTWYQQKPGQAPRLL |
| | IYWASTRESGIPARFSGSGSGTEFTLTISSLQSEDFAVYYCQNDYGFPLTFGQGT |
| | KVEIK (SEQ ID NO: 382) |
| 11A8V1-5 | DIQMTQSPSTLSASVGDRVTITCKSSQSLLNSGNQKKYLTWYQQKPGKAPKLL |
| | IYWASTRESGVPSRFSGSGSGTEFTLTISSLQPDDFATYYCQNDYGFPLTFGQG |
| | TKVEIK (SEQ ID NO: 383) |
| 11A8V3-20 | EIVLTQSPGTLSLSPGERATLSCKSSQSLLNSGNQKKYLTWYQQKPGQAPRLLI |
| | YWASTRESGIPDRFSGSGSGTDFTLTISRLEPEDFAVYYCQNDYGFPLTFGQGT |
| | KVEIK (SEQ ID NO: 384) |
| 11A8V1-9 | DIQLTQSPSFLSASVGDRVTITCKSSQSLLNSGNQKKYLTWYQQKPGKAPKLLI |
| | YWASTRESGVPSRFSGSGSGTEFTLTISSLQPEDFATYYCQNDYGFPLTFGQGT |
| | KVEIK (SEQ ID NO: 385) |
| 11A8V1-39 | DIQMTQSPSSLSASVGDRVTITCKSSQSLLNSGNQKKYLTWYQQKPGKAPKLL |
| | IYWASTRESGVPSRFSGSGSGTDFTLTISSLQPEDFATYYCQNDYGFPLTFGQG |
| | TKVEIK (SEQ ID NO: 386) |
| Antibody 12D9 | Antibody 12D9 |
| 12D9V4-1 | DIVMTQSPDSLAVSLGERATINCKSSQSLLYSGNQKNFLAWYQQKPGQPPKLL |
| | IYWASTRESGVPDRFSGSGSGTDFTLTISSLQAEDVAVYYCQQYYSYPFTFGQ |
| | GTKVEIK (SEQ ID NO: 388) |
| 12D9V2-28 | DIVMTQSPLSLPVTPGEPASISCKSSQSLLYSGNQKNFLAWYLQKPGQSPQLLI |
| | YWASTRESGVPDRFSGSGSGTDFTLKISRVEAEDVGVYYCQQYYSYPFTFGQG |
| | TKVEIK (SEQ ID NO: 389) |
| 12D9V2-30 | DVVMTQSPLSLPVTLGQPASISCKSSQSLLYSGNQKNFLAWFQQRPGQSPRRLI |
| | YWASTRESGVPDRFSGSGSGTDFTLKISRVEAEDVGVYYCQQYYSYPFTFGQG |
| | TKVEIK (SEQ ID NO: 390) |
| 12D9V1-9 | DIQLTQSPSFLSASVGDRVTITCKSSQSLLYSGNQKNFLAWYQQKPGKAPKLLI |
| | YWASTRESGVPSRFSGSGSGTEFTLTISSLQPEDFATYYCQQYYSYPFTFGQGT |
| | KVEIK (SEQ ID NO: 391) |
| 12D9V1-5 | DIQMTQSPSTLSASVGDRVTITCKSSQSLLYSGNQKNFLAWYQQKPGKAPKLL |
| | IYWASTRESGVPSRFSGSGSGTEFTLTISSLQPDDFATYYCQQYYSYPFTFGQG |
| | TKVEIK (SEQ ID NO: 392) |
| 12D9V3-15 | EIVMTQSPATLSVSPGERATLSCKSSQSLLYSGNQKNFLAWYQQKPGQAPRLL |
| | IYWASTRESGIPARFSGSGSGTEFTLTISSLQSEDFAVYYCQQYYSYPFTFGQGT |
| | KVEIK (SEQ ID NO: 393) |
| 12D9V1-33 | DIQMTQSPSSLSASVGDRVTITCKSSQSLLYSGNQKNFLAWYQQKPGKAPKLL |
| | IYWASTRESGVPSRFSGSGSGTDFTFTISSLQPEDIATYYCQQYYSYPFTFGQGT |
| | KVEIK (SEQ ID NO: 394) |
| 12D9V3-11 | EIVLTQSPATLSLSPGERATLSCKSSQSLLYSGNQKNFLAWYQQKPGQAPRLLI |
| | YWASTRESGIPARFSGSGSGTDFTLTISSLEPEDFAVYYCQQYYSYPFTFGQGT |
| | KVEIK (SEQ ID NO: 395) |
| 12D9V1-39 | DIQMTQSPSSLSASVGDRVTITCKSSQSLLYSGNQKNFLAWYQQKPGKAPKLL |
| | IYWASTRESGVPSRFSGSGSGTDFTLTISSLQPEDFATYYCQQYYSYPFTFGQG |
| | TKVEIK (SEQ ID NO: 396) |
| 12D9V3-20 | EIVLTQSPGTLSLSPGERATLSCKSSQSLLYSGNQKNFLAWYQQKPGQAPRLLI |
| | YWASTRESGIPDRFSGSGSGTDFTLTISRLEPEDFAVYYCQQYYSYPFTFGQGT |
| | KVEIK (SEQ ID NO: 397) |
| Antibody 12F9 | Antibody 12F9 |
| 12F9V4-1 | DIVMTQSPDSLAVSLGERATINCKSSQSLLYSSDQKNYLAWYQQKPGQPPKLL |
| | IYWASTRESGVPDRFSGSGSGTDFTLTISSLQAEDVAVYYCQQYYSYPLTFGQ |
| | GTKVEIK (SEQ ID NO: 300) |
| 12F9V2-28 | DIVMTQSPLSLPVTPGEPASISCKSSQSLLYSSDQKNYLAWYLQKPGQSPQLLI |
| | YWASTRESGVPDRFSGSGSGTDFTLKISRVEAEDVGVYYCQQYYSYPLTFGQ |
| | GTKVEIK (SEQ ID NO: 301) |
| 12F9V2-30 | DVVMTQSPLSLPVTLGQPASISCKSSQSLLYSSDQKNYLAWFQQRPGQSPRRLI |
| | YWASTRESGVPDRFSGSGSGTDFTLKISRVEAEDVGVYYCQQYYSYPLTFGQ |
| | GTKVEIK (SEQ ID NO: 302) |
| 12F9V3-15 | EIVMTQSPATLSVSPGERATLSCKSSQSLLYSSDQKNYLAWYQQKPGQAPRLLI |
| | YWASTRESGIPARFSGSGSGTEFTLTISSLQSEDFAVYYCQQYYSYPLTFGQGT |
| | KVEIK (SEQ ID NO: 305) |
| 12F9V1-5 | DIQMTQSPSTLSASVGDRVTITCKSSQSLLYSSDQKNYLAWYQQKPGKAPKLL |
| | IYWASTRESGVPSRFSGSGSGTEFTLTISSLQPDDFATYYCQQYYSYPLTFGQG |
| | TKVEIK (SEQ ID NO: 303) |
| 12F9V1-9 | DIQLTQSPSFLSASVGDRVTITCKSSQSLLYSSDQKNYLAWYQQKPGKAPKLLI |
| | YWASTRESGVPSRFSGSGSGTEFTLTISSLQPEDFATYYCQQYYSYPLTFGQGT |
| | KVEIK (SEQ ID NO: 304) |
| 12F9V1-33 | DIQMTQSPSSLSASVGDRVTITCKSSQSLLYSSDQKNYLAWYQQKPGKAPKLLI |
| | YWASTRESGVPSRFSGSGSGTDFTFTISSLQPEDIATYYCQQYYSYPLTFGQGT |
| | KVEIK (SEQ ID NO: 308) |
| 12F9V3-11 | EIVLTQSPATLSLSPGERATLSCKSSQSLLYSSDQKNYLAWYQQKPGQAPRLLI |
| | YWASTRESGIPARFSGSGSGTDFTLTISSLEPEDFAVYYCQQYYSYPLTFGQGT |
| | KVEIK (SEQ ID NO: 307) |
| 12F9V1-39 | DIQMTQSPSSLSASVGDRVTITCKSSQSLLYSSDQKNYLAWYQQKPGKAPKLLI |
| | YWASTRESGVPSRFSGSGSGTDFTLTISSLQPEDFATYYCQQYYSYPLTFGQGT |
| | KVEIK (SEQ ID NO: 306) |
| 12F9V3-20 | EIVLTQSPGTLSLSPGERATLSCKSSQSLLYSSDQKNYLAWYQQKPGQAPRLLI |
| | YWASTRESGIPDRFSGSGSGTDFTLTISRLEPEDFAVYYCQQYYSYPLTFGQGT |
| | KVEIK (SEQ ID NO: 309) |
| Antibody 10C1 | Antibody 10C1 |
| 10C1V4-1 | DIVMTQSPDSLAVSLGERATINCKSSQSVFYSSNQKNYLAWYQQKPGQPPKLL |
| | IYWASTRESGVPDRFSGSGSGTDFTLTISSLQAEDVAVYYCHQYLSSLTFGQGT |
| | KVEIK (SEQ ID NO: 603) |
| 10C1V2-30 | DVVMTQSPLSLPVTLGQPASISCKSSQSVFYSSNQKNYLAWFQQRPGQSPRRLI |
| | YWASTRESGVPDRFSGSGSGTDFTLKISRVEAEDVGVYYCHQYLSSLTFGQGT |
| | KVEIK (SEQ ID NO: 604) |
| 10C1V2-28 | DIVMTQSPLSLPVTPGEPASISCKSSQSVFYSSNQKNYLAWYLQKPGQSPQLLI |
| | YWASTRESGVPDRFSGSGSGTDFTLKISRVEAEDVGVYYCHQYLSSLTFGQGT |
| | KVEIK (SEQ ID NO: 605) |
| 10C1V1-5 | DIQMTQSPSTLSASVGDRVTITCKSSQSVEYSSNQKNYLAWYQQKPGKAPKLL |
| | IYWASTRESGVPSRFSGSGSGTEFTLTISSLQPDDFATYYCHQYLSSLTFGQGT |
| | KVEIK (SEQ ID NO: 606) |
| 10C1V3-15 | EIVMTQSPATLSVSPGERATLSCKSSQSVEYSSNQKNYLAWYQQKPGQAPRLLI |
| | YWASTRESGIPARFSGSGSGTEFTLTISSLQSEDFAVYYCHQYLSSLTFGQGTK |
| | VEIK (SEQ ID NO: 607) |
| 10C1V1-9 | DIQLTQSPSFLSASVGDRVTITCKSSQSVEYSSNQKNYLAWYQQKPGKAPKLLI |
| | YWASTRESGVPSRFSGSGSGTEFTLTISSLQPEDFATYYCHQYLSSLTFGQGTK |
| | VEIK (SEQ ID NO: 608) |
| 10C1V3-11 | EIVLTQSPATLSLSPGERATLSCKSSQSVEYSSNQKNYLAWYQQKPGQAPRLLI |
| | YWASTRESGIPARFSGSGSGTDFTLTISSLEPEDFAVYYCHQYLSSLTFGQGTK |
| | VEIK (SEQ ID NO: 609) |
| 10C1V1-39 | DIQMTQSPSSLSASVGDRVTITCKSSQSVEYSSNQKNYLAWYQQKPGKAPKLLI |
| | YWASTRESGVPSRFSGSGSGTDFTLTISSLQPEDFATYYCHQYLSSLTFGQGTK |
| | VEIK (SEQ ID NO: 610) |
| 10C1V1-33 | DIQMTQSPSSLSASVGDRVTITCKSSQSVEYSSNQKNYLAWYQQKPGKAPKLLI |
| | YWASTRESGVPSRFSGSGSGTDFTFTISSLQPEDIATYYCHQYLSSLTFGQGTK |
| | VEIK (SEQ ID NO: 611) |
| 10C1V3-20 | EIVLTQSPGTLSLSPGERATLSCKSSQSVEYSSNQKNYLAWYQQKPGQAPRLLI |
| | YWASTRESGIPDRFSGSGSGTDFTLTISRLEPEDFAVYYCHQYLSSLTFGQGTK |
| | VEIK (SEQ ID NO: 612) |
| Antibody 7E9 | Antibody 7E9 |
| 7E9V4-1 | DIVMTQSPDSLAVSLGERATINCKSSQSLLYSSNQKNCLAWYQQKPGQPPKLL |
| | IYWASTRESGVPDRFSGSGSGTDFTLTISSLQAEDVAVYYCQQYYSYPLTFGQ |
| | GTKVEIK (SEQ ID NO: 614) |
| 7E9V2-28 | DIVMTQSPLSLPVTPGEPASISCKSSQSLLYSSNQKNCLAWYLQKPGQSPQLLI |
| | YWASTRESGVPDRFSGSGSGTDFTLKISRVEAEDVGVYYCQQYYSYPLTFGQ |
| | GTKVEIK (SEQ ID NO: 615) |
| 7E9V2-30 | DVVMTQSPLSLPVTLGQPASISCKSSQSLLYSSNQKNCLAWFQQRPGQSPRRLI |
| | YWASTRESGVPDRFSGSGSGTDFTLKISRVEAEDVGVYYCQQYYSYPLTFGQ |
| | GTKVEIK (SEQ ID NO: 616) |
| 7E9V1-9 | DIQLTQSPSFLSASVGDRVTITCKSSQSLLYSSNQKNCLAWYQQKPGKAPKLLI |
| | YWASTRESGVPSRFSGSGSGTEFTLTISSLQPEDFATYYCQQYYSYPLTFGQGT |
| | KVEIK (SEQ ID NO: 617) |
| 7E9V3-15 | EIVMTQSPATLSVSPGERATLSCKSSQSLLYSSNQKNCLAWYQQKPGQAPRLLI |
| | YWASTRESGIPARFSGSGSGTEFTLTISSLQSEDFAVYYCQQYYSYPLTFGQGT |
| | KVEIK (SEQ ID NO: 618) |
| 7E9V1-5 | DIQMTQSPSTLSASVGDRVTITCKSSQSLLYSSNQKNCLAWYQQKPGKAPKLL |
| | IYWASTRESGVPSRFSGSGSGTEFTLTISSLQPDDFATYYCQQYYSYPLTFGQG |
| | TKVEIK (SEQ ID NO: 619) |
| 7E9V1-33 | DIQMTQSPSSLSASVGDRVTITCKSSQSLLYSSNQKNCLAWYQQKPGKAPKLLI |
| | YWASTRESGVPSRFSGSGSGTDFTFTISSLQPEDIATYYCQQYYSYPLTFGQGT |
| | KVEIK (SEQ ID NO: 620) |
| 7E9V1-39 | DIQMTQSPSSLSASVGDRVTITCKSSQSLLYSSNQKNCLAWYQQKPGKAPKLLI |
| | YWASTRESGVPSRFSGSGSGTDFTLTISSLQPEDFATYYCQQYYSYPLTFGQGT |
| | KVEIK (SEQ ID NO: 621) |
| 7E9V3-11 | EIVLTQSPATLSLSPGERATLSCKSSQSLLYSSNQKNCLAWYQQKPGQAPRLLI |
| | YWASTRESGIPARFSGSGSGTDFTLTISSLEPEDFAVYYCQQYYSYPLTFGQGT |
| | KVEIK (SEQ ID NO: 622) |
| 7E9V3-20 | EIVLTQSPGTLSLSPGERATLSCKSSQSLLYSSNQKNCLAWYQQKPGQAPRLLI |
| | YWASTRESGIPDRFSGSGSGTDFTLTISRLEPEDFAVYYCQQYYSYPLTFGQGT |
| | KVEIK (SEQ ID NO: 623) |
| Antibody 8C3 | Antibody 8C3 |
| 8C3V2-30 | DVVMTQSPLSLPVTLGQPASISCRSSQSLVHSNGNTYLHWFQQRPGQSPRRLIY |
| | KVSNRFSGVPDRFSGSGSGTDFTLKISRVEAEDVGVYYCSQSTHVPPTFGQGT |
| | KVEIK (SEQ ID NO: 625) |
| 8C3V2-28 | DIVMTQSPLSLPVTPGEPASISCRSSQSLVHSNGNTYLHWYLQKPGQSPQLLIY |
| | KVSNRFSGVPDRFSGSGSGTDFTLKISRVEAEDVGVYYCSQSTHVPPTFGQGT |
| | KVEIK (SEQ ID NO: 626) |
| 8C3V4-1 | DIVMTQSPDSLAVSLGERATINCRSSQSLVHSNGNTYLHWYQQKPGQPPKLLI |
| | YKVSNRFSGVPDRFSGSGSGTDFTLTISSLQAEDVAVYYCSQSTHVPPTFGQGT |
| | KVEIK (SEQ ID NO: 627) |
| 8C3V3-11 | EIVLTQSPATLSLSPGERATLSCRSSQSLVHSNGNTYLHWYQQKPGQAPRLLIY |
| | KVSNRFSGIPARFSGSGSGTDFTLTISSLEPEDFAVYYCSQSTHVPPTFGQGTKV |
| | EIK (SEQ ID NO: 628) |
| 8C3V1-33 | DIQMTQSPSSLSASVGDRVTITCRSSQSLVHSNGNTYLHWYQQKPGKAPKLLI |
| | YKVSNRFSGVPSRFSGSGSGTDFTFTISSLQPEDIATYYCSQSTHVPPTFGQGTK |
| | VEIK (SEQ ID NO: 629) |
| 8C3V1-5 | DIQMTQSPSTLSASVGDRVTITCRSSQSLVHSNGNTYLHWYQQKPGKAPKLLI |
| | YKVSNRFSGVPSRFSGSGSGTEFTLTISSLQPDDFATYYCSQSTHVPPTFGQGTK |
| | VEIK (SEQ ID NO: 630) |
| 8C3V1-39 | DIQMTQSPSSLSASVGDRVTITCRSSQSLVHSNGNTYLHWYQQKPGKAPKLLI |
| | YKVSNRFSGVPSRFSGSGSGTDFTLTISSLQPEDFATYYCSQSTHVPPTFGQGT |
| | KVEIK (SEQ ID NO: 631) |
| 8C3V1-9 | DIQLTQSPSFLSASVGDRVTITCRSSQSLVHSNGNTYLHWYQQKPGKAPKLLIY |
| | KVSNRFSGVPSRFSGSGSGTEFTLTISSLQPEDFATYYCSQSTHVPPTFGQGTKV |
| | EIK (SEQ ID NO: 632) |
| 8C3V3-15 | EIVMTQSPATLSVSPGERATLSCRSSQSLVHSNGNTYLHWYQQKPGQAPRLLI |
| | YKVSNRFSGIPARFSGSGSGTEFTLTISSLQSEDFAVYYCSQSTHVPPTFGQGTK |
| | VEIK (SEQ ID NO: 633) |
| 8C3V3-20 | EIVLTQSPGTLSLSPGERATLSCRSSQSLVHSNGNTYLHWYQQKPGQAPRLLIY |
| | KVSNRFSGIPDRFSGSGSGTDFTLTISRLEPEDFAVYYCSQSTHVPPTFGQGTKV |
| | EIK (SEQ ID NO: 634) |

TABLE 7B
Humanized heavy chain variable region sequences

| Antibody variant | Humanized sequences |
|---|---|
| Antibody 4D11 | Antibody 4D11 |
| 4D11V4-59 | QVQLQESGPGLVKPSETLSLTCTVSGFTLSSYAMSWIRQPPGKGLEWVASISR |
| | GGSTYYPPSLKSRVTISVDTSKNQFSLKLSSVTAADTAVYYCTRGYGYYRTP |
| | FANWGQGTLVTVSS (SEQ ID NO: 400) |
| 4D11V3-23 | EVQLLESGGGLVQPGGSLRLSCAASGFTLSSYAMSWVRQAPGKGLEWVASIS |
| | RGGSTYYPDSVKGRFTISRDNSKNTLYLQMNSLRAEDTAVYYCTRGYGYYR |
| | TPFANWGQGTLVTVSS (SEQ ID NO: 401) |
| 4D11V3-7 | EVQLVESGGGLVQPGGSLRLSCAASGFTLSSYAMSWVRQAPGKGLEWVASIS |
| | RGGSTYYPDSVKGRFTISRDNAKNSLYLQMNSLRAEDTAVYYCTRGYGYYR |
| | TPFANWGQGTLVTVSS (SEQ ID NO: 402) |
| 4D11V3-48 | EVQLVESGGGLVQPGGSLRLSCAASGFTLSSYAMSWVRQAPGKGLEWVASIS |
| | RGGSTYYPDSVKGRFTISRDNAKNSLYLQMNSLRAEDTAVYYCTRGYGYYR |
| | TPFANWGQGTLVTVSS (SEQ ID NO: 402) |
| 4D11V3-30 | QVQLVESGGGVVQPGRSLRLSCAASGFTLSSYAMSWVRQAPGKGLEWVASI |
| | SRGGSTYYPDSVKGRFTISRDNSKNTLYLQMNSLRAEDTAVYYCTRGYGYY |
| | RTPFANWGQGTLVTVSS (SEQ ID NO: 403) |
| 4D11V1-69 | QVQLVQSGAEVKKPGSSVKVSCKASGFTLSSYAMSWVRQAPGQGLEWVASI |
| | SRGGSTYYPQKFQGRVTITADESTSTAYMELSSLRSEDTAVYYCTRGYGYYR |
| | TPFANWGQGTLVTVSS (SEQ ID NO: 404) |
| 4D11V1-46 | QVQLVQSGAEVKKPGASVKVSCKASGFTLSSYAMSWVRQAPGQGLEWVASI |
| | SRGGSTYYPQKFQGRVTMTRDTSTSTVYMELSSLRSEDTAVYYCTRGYGYY |
| | RTPFANWGQGTLVTVSS (SEQ ID NO: 405) |
| 4D11V5-51 | EVQLVQSGAEVKKPGESLKISCKGSGFTLSSYAMSWVRQMPGKGLEWVASIS |
| | RGGSTYYPPSFQGQVTISADKSISTAYLQWSSLKASDTAMYYCTRGYGYYR |
| | TPFANWGQGTLVTVSS (SEQ ID NO: 406) |
| 4D11V4-39 | QLQLQESGPGLVKPSETLSLTCTVSGFTLSSYAMSWIRQPPGKGLEWVASISR |
| | GGSTYYPPSLKSRVTISVDTSKNQFSLKLSSVTAADTAVYYCTRGYGYYRTP |
| | FANWGQGTLVTVSS (SEQ ID NO: 407) |
| 4D11V4-30-4 | QVQLQESGPGLVKPSQTLSLTCTVSGFTLSSYAMSWIRQPPGKGLEWVASISR |
| | GGSTYYPPSLKSRVTISVDTSKNQFSLKLSSVTAADTAVYYCTRGYGYYRTP |
| | FANWGQGTLVTVSS (SEQ ID NO: 408) |
| Antibody 7C5 | Antibody 7C5 |
| 7C5V4-59 | QVQLQESGPGLVKPSETLSLTCTVSGFTLSSYAMSWIRQPPGKGLEWVASISR |
| | GGSTYYPPSLKSRVTISVDTSKNQFSLKLSSVTAADTAVYYCTRGYGYYRTP |
| | FANWGQGTLVTVSS (SEQ ID NO: 400) |
| 7C5V3-23 | EVQLLESGGGLVQPGGSLRLSCAASGFTLSSYAMSWVRQAPGKGLEWVASIS |
| | RGGSTYYPDSVKGRFTISRDNSKNTLYLQMNSLRAEDTAVYYCTRGYGYYR |
| | TPFANWGQGTLVTVSS (SEQ ID NO: 401) |
| 7C5V3-7 | EVQLVESGGGLVQPGGSLRLSCAASGFTLSSYAMSWVRQAPGKGLEWVASIS |
| | RGGSTYYPDSVKGRFTISRDNAKNSLYLQMNSLRAEDTAVYYCTRGYGYYR |
| | TPFANWGQGTLVTVSS (SEQ ID NO: 402) |
| 7C5V3-48 | EVQLVESGGGLVQPGGSLRLSCAASGFTLSSYAMSWVRQAPGKGLEWVASIS |
| | RGGSTYYPDSVKGRFTISRDNAKNSLYLQMNSLRAEDTAVYYCTRGYGYYR |
| | TPFANWGQGTLVTVSS (SEQ ID NO: 402) |
| 7C5V3-30 | QVQLVESGGGVVQPGRSLRLSCAASGFTLSSYAMSWVRQAPGKGLEWVASI |
| | SRGGSTYYPDSVKGRFTISRDNSKNTLYLQMNSLRAEDTAVYYCTRGYGYY |
| | RTPFANWGQGTLVTVSS (SEQ ID NO: 403) |
| 7C5V1-69 | QVQLVQSGAEVKKPGSSVKVSCKASGFTLSSYAMSWVRQAPGQGLEWVASI |
| | SRGGSTYYPQKFQGRVTITADESTSTAYMELSSLRSEDTAVYYCTRGYGYYR |
| | TPFANWGQGTLVTVSS (SEQ ID NO: 404) |
| 7C5V1-46 | QVQLVQSGAEVKKPGASVKVSCKASGFTLSSYAMSWVRQAPGQGLEWVASI |
| | SRGGSTYYPQKFQGRVTMTRDTSTSTVYMELSSLRSEDTAVYYCTRGYGYY |
| | RTPFANWGQGTLVTVSS (SEQ ID NO: 405) |
| 7C5V5-51 | EVQLVQSGAEVKKPGESLKISCKGSGFTLSSYAMSWVRQMPGKGLEWVASIS |
| | RGGSTYYPPSFQGQVTISADKSISTAYLQWSSLKASDTAMYYCTRGYGYYR |
| | TPFANWGQGTLVTVSS (SEQ ID NO: 406) |
| 7C5V4-39 | QLQLQESGPGLVKPSETLSLTCTVSGFTLSSYAMSWIRQPPGKGLEWVASISR |
| | GGSTYYPPSLKSRVTISVDTSKNQFSLKLSSVTAADTAVYYCTRGYGYYRTP |
| | FANWGQGTLVTVSS (SEQ ID NO: 407) |
| 7C5V4-30-4 | QVQLQESGPGLVKPSQTLSLTCTVSGFTLSSYAMSWIRQPPGKGLEWVASISR |
| | GGSTYYPPSLKSRVTISVDTSKNQFSLKLSSVTAADTAVYYCTRGYGYYRTP |
| | FANWGQGTLVTVSS (SEQ ID NO: 408) |
| Antibody 6G12 | Antibody 6G12 |
| 6G12V1-46 | QVQLVQSGAEVKKPGASVKVSCKASGYTFTEYTMHWVRQAPGQGLEWIGG |
| | INPNNGGTSYSQKFQGRVTMTRDTSTSTVYMELSSLRSEDTAVYYCARGGS |
| | HYYAMDYWGQGTLVTVSS (SEQ ID NO: 410) |
| 6G12V5-51 | EVQLVQSGAEVKKPGESLKISCKGSGYTFTEYTMHWVRQMPGKGLEWIGGI |
| | NPNNGGTSYSPSFQGQVTISADKSISTAYLQWSSLKASDTAMYYCARGGSHY |
| | YAMDYWGQGTLVTVSS (SEQ ID NO: 411) |
| 6G12V1-69 | QVQLVQSGAEVKKPGSSVKVSCKASGYTFTEYTMHWVRQAPGQGLEWIGG |
| | INPNNGGTSYSQKFQGRVTITADESTSTAYMELSSLRSEDTAVYYCARGGSH |
| | YYAMDYWGQGTLVTVSS (SEQ ID NO: 412) |
| 6G12V3-23 | EVQLLESGGGLVQPGGSLRLSCAASGYTFTEYTMHWVRQAPGKGLEWIGGI |
| | NPNNGGTSYSDSVKGRFTISRDNSKNTLYLQMNSLRAEDTAVYYCARGGSH |
| | YYAMDYWGQGTLVTVSS (SEQ ID NO: 413) |
| 6G12V3-30 | QVQLVESGGGVVQPGRSLRLSCAASGYTFTEYTMHWVRQAPGKGLEWIGGI |
| | NPNNGGTSYSDSVKGRFTISRDNSKNTLYLQMNSLRAEDTAVYYCARGGSH |
| | YYAMDYWGQGTLVTVSS (SEQ ID NO: 414) |
| 6G12V3-48 | EVQLVESGGGLVQPGGSLRLSCAASGYTFTEYTMHWVRQAPGKGLEWIGGI |
| | NPNNGGTSYSDSVKGRFTISRDNAKNSLYLQMNSLRAEDTAVYYCARGGSH |
| | YYAMDYWGQGTLVTVSS (SEQ ID NO: 415) |
| 6G12V3-7 | EVQLVESGGGLVQPGGSLRLSCAASGYTFTEYTMHWVRQAPGKGLEWIGGI |
| | NPNNGGTSYSDSVKGRFTISRDNAKNSLYLQMNSLRAEDTAVYYCARGGSH |
| | YYAMDYWGQGTLVTVSS (SEQ ID NO: 415) |
| 6G12V4-59 | QVQLQESGPGLVKPSETLSLTCTVSGYTFTEYTMHWIRQPPGKGLEWIGGIN |
| | PNNGGTSYSPSLKSRVTISVDTSKNQFSLKLSSVTAADTAVYYCARGGSHYY |
| | AMDYWGQGTLVTVSS (SEQ ID NO: 416) |
| 6G12V3-15 | EVQLVESGGGLVKPGGSLRLSCAASGYTFTEYTMHWVRQAPGKGLEWIGGI |
| | NPNNGGTSYSAPVKGRFTISRDDSKNTLYLQMNSLKTEDTAVYYCARGGSH |
| | YYAMDYWGQGTLVTVSS (SEQ ID NO: 417) |
| 6G12V4-39 | QLQLQESGPGLVKPSETLSLTCTVSGYTFTEYTMHWIRQPPGKGLEWIGGIN |
| | PNNGGTSYSPSLKSRVTISVDTSKNQFSLKLSSVTAADTAVYYCARGGSHYY |
| | AMDYWGQGTLVTVSS (SEQ ID NO: 418) |
| Antibody 8E10 | Antibody 8E10 |
| 8E10V1-46 | QVQLVQSGAEVKKPGASVKVSCKASGYTFTDYEMHWVRQAPGQGLEWIGV |
| | IDPETGGTAYNQKFQGRVTMTRDTSTSTVYMELSSLRSEDTAVYYCTSPDYY |
| | GSSYPLYYAMDYWGQGTLVTVSS (SEQ ID NO: 420) |
| 8E10V5-51 | EVQLVQSGAEVKKPGESLKISCKGSGYTFTDYEMHWVRQMPGKGLEWIGVI |
| | DPETGGTAYNPSFQGQVTISADKSISTAYLQWSSLKASDTAMYYCTSPDYYG |
| | SSYPLYYAMDYWGQGTLVTVSS (SEQ ID NO: 421) |
| 8E10V3-30 | QVQLVESGGGVVQPGRSLRLSCAASGYTFTDYEMHWVRQAPGKGLEWIGVI |
| | DPETGGTAYNDSVKGRFTISRDNSKNTLYLQMNSLRAEDTAVYYCTSPDYY |
| | GSSYPLYYAMDYWGQGTLVTVSS (SEQ ID NO: 422) |
| 8E10V3-23 | EVQLLESGGGLVQPGGSLRLSCAASGYTFTDYEMHWVRQAPGKGLEWIGVI |
| | DPETGGTAYNDSVKGRFTISRDNSKNTLYLQMNSLRAEDTAVYYCTSPDYY |
| | GSSYPLYYAMDYWGQGTLVTVSS (SEQ ID NO: 423) |
| 8E10V1-69 | QVQLVQSGAEVKKPGSSVKVSCKASGYTFTDYEMHWVRQAPGQGLEWIGV |
| | IDPETGGTAYNQKFQGRVTITADESTSTAYMELSSLRSEDTAVYYCTSPDYY |
| | GSSYPLYYAMDYWGQGTLVTVSS (SEQ ID NO: 424) |
| 8E10V3-48 | EVQLVESGGGLVQPGGSLRLSCAASGYTFTDYEMHWVRQAPGKGLEWIGVI |
| | DPETGGTAYNDSVKGRFTISRDNAKNSLYLQMNSLRAEDTAVYYCTSPDYY |
| | GSSYPLYYAMDYWGQGTLVTVSS (SEQ ID NO: 425) |
| 8E10V3-7 | EVQLVESGGGLVQPGGSLRLSCAASGYTFTDYEMHWVRQAPGKGLEWIGVI |
| | DPETGGTAYNDSVKGRFTISRDNAKNSLYLQMNSLRAEDTAVYYCTSPDYY |
| | GSSYPLYYAMDYWGQGTLVTVSS (SEQ ID NO: 425) |
| 8E10V4-59 | QVQLQESGPGLVKPSETLSLTCTVSGYTFTDYEMHWIRQPPGKGLEWIGVID |
| | PETGGTAYNPSLKSRVTISVDTSKNQFSLKLSSVTAADTAVYYCTSPDYYGSS |
| | YPLYYAMDYWGQGTLVTVSS (SEQ ID NO: 426) |
| 8E10V3-15 | EVQLVESGGGLVKPGGSLRLSCAASGYTFTDYEMHWVRQAPGKGLEWIGVI |
| | DPETGGTAYNAPVKGRFTISRDDSKNTLYLQMNSLKTEDTAVYYCTSPDYY |
| | GSSYPLYYAMDYWGQGTLVTVSS (SEQ ID NO: 427) |
| 8E10V4-39 | QLQLQESGPGLVKPSETLSLTCTVSGYTFTDYEMHWIRQPPGKGLEWIGVID |
| | PETGGTAYNPSLKSRVTISVDTSKNQFSLKLSSVTAADTAVYYCTSPDYYGSS |
| | YPLYYAMDYWGQGTLVTVSS (SEQ ID NO: 428) |
| Antibody 7E5 | Antibody 7E5 |
| 7E5V3-15 | EVQLVESGGGLVKPGGSLRLSCAASGFTFSDAWMGWVRQAPGKGLEWVAE |
| | IRDKVKNHATYYAAPVKGRFTISRDDSKNTLYLQMNSLKTEDTAVYYCRLG |
| | VFDYWGQGTLVTVSS (SEQ ID NO: 430) |
| 7E5V3-7 | EVQLVESGGGLVQPGGSLRLSCAASGFTFSDAWMGWVRQAPGKGLEWVAE |
| | IRDKVKNHATYYADSVKGRFTISRDNAKNSLYLQMNSLRAEDTAVYYCRLG |
| | VFDYWGQGTLVTVSS (SEQ ID NO: 431) |
| 7E5V3-23 | EVQLLESGGGLVQPGGSLRLSCAASGFTFSDAWMGWVRQAPGKGLEWVAE |
| | IRDKVKNHATYYADSVKGRFTISRDNSKNTLYLQMNSLRAEDTAVYYCRLG |
| | VFDYWGQGTLVTVSS (SEQ ID NO: 432) |
| 7E5V3-48 | EVQLVESGGGLVQPGGSLRLSCAASGFTFSDAWMGWVRQAPGKGLEWVAE |
| | IRDKVKNHATYYADSVKGRFTISRDNAKNSLYLQMNSLRAEDTAVYYCRLG |
| | VFDYWGQGTLVTVSS (SEQ ID NO: 431) |
| 7E5V3-30 | QVQLVESGGGVVQPGRSLRLSCAASGFTFSDAWMGWVRQAPGKGLEWVAE |
| | IRDKVKNHATYYADSVKGRFTISRDNSKNTLYLQMNSLRAEDTAVYYCRLG |
| | VFDYWGQGTLVTVSS (SEQ ID NO: 433) |
| 7E5V1-69 | QVQLVQSGAEVKKPGSSVKVSCKASGFTFSDAWMGWVRQAPGQGLEWVA |
| | EIRDKVKNHATYYAQKFQGRVTITADESTSTAYMELSSLRSEDTAVYYCRLG |
| | VFDYWGQGTLVTVSS (SEQ ID NO: 434) |
| 7E5V1-46 | QVQLVQSGAEVKKPGASVKVSCKASGFTFSDAWMGWVRQAPGQGLEWVA |
| | EIRDKVKNHATYYAQKFQGRVTMTRDTSTSTVYMELSSLRSEDTAVYYCRL |
| | GVFDYWGQGTLVTVSS (SEQ ID NO: 435) |
| 7E5V5-51 | EVQLVQSGAEVKKPGESLKISCKGSGFTFSDAWMGWVRQMPGKGLEWVAE |
| | IRDKVKNHATYYAPSFQGQVTISADKSISTAYLQWSSLKASDTAMYYCRLG |
| | VFDYWGQGTLVTVSS (SEQ ID NO: 436) |
| 7E5V4-59 | QVQLQESGPGLVKPSETLSLTCTVSGFTFSDAWMGWIRQPPGKGLEWVAEIR |
| | DKVKNHATYYAPSLKSRVTISVDTSKNQFSLKLSSVTAADTAVYYCRLGVFD |
| | YWGQGTLVTVSS (SEQ ID NO: 437) |
| 7E5V4-39 | QLQLQESGPGLVKPSETLSLTCTVSGFTFSDAWMGWIRQPPGKGLEWVAEIR |
| | DKVKNHATYYAPSLKSRVTISVDTSKNQFSLKLSSVTAADTAVYYCRLGVFD |
| | YWGQGTLVTVSS (SEQ ID NO: 438) |
| Antibody 7F8 | Antibody 7F8 |
| 7F8V3-15 | EVQLVESGGGLVKPGGSLRLSCAASGFSFNTYAMNWVRQAPGKGLEWIARI |
| | RSKSNNYATYYAAPVKGRFTISRDDSKNTLYLQMNSLKTEDTAVYYCVRHG |
| | DGNLWYIDVWGQGTLVTVSS (SEQ ID NO: 440) |
| 7F8V3-48 | EVQLVESGGGLVQPGGSLRLSCAASGFSFNTYAMNWVRQAPGKGLEWIARI |
| | RSKSNNYATYYADSVKGRFTISRDNAKNSLYLQMNSLRAEDTAVYYCVRHG |
| | DGNLWYIDVWGQGTLVTVSS (SEQ ID NO: 441) |
| 7F8V3-23 | EVQLLESGGGLVQPGGSLRLSCAASGFSFNTYAMNWVRQAPGKGLEWIARI |
| | RSKSNNYATYYADSVKGRFTISRDNSKNTLYLQMNSLRAEDTAVYYCVRHG |
| | DGNLWYIDVWGQGTLVTVSS (SEQ ID NO: 442) |
| 7F8V3-7 | EVQLVESGGGLVQPGGSLRLSCAASGFSFNTYAMNWVRQAPGKGLEWIARI |
| | RSKSNNYATYYADSVKGRFTISRDNAKNSLYLQMNSLRAEDTAVYYCVRHG |
| | DGNLWYIDVWGQGTLVTVSS (SEQ ID NO: 441) |
| 7F8V3-30 | QVQLVESGGGVVQPGRSLRLSCAASGFSFNTYAMNWVRQAPGKGLEWIARI |
| | RSKSNNYATYYADSVKGRFTISRDNSKNTLYLQMNSLRAEDTAVYYCVRHG |
| | DGNLWYIDVWGQGTLVTVSS (SEQ ID NO: 443) |
| 7F8V1-69 | QVQLVQSGAEVKKPGSSVKVSCKASGFSFNTYAMNWVRQAPGQGLEWIARI |
| | RSKSNNYATYYAQKFQGRVTITADESTSTAYMELSSLRSEDTAVYYCVRHG |
| | DGNLWYIDVWGQGTLVTVSS (SEQ ID NO: 444) |
| 7F8V5-51 | EVQLVQSGAEVKKPGESLKISCKGSGFSFNTYAMNWVRQMPGKGLEWIARI |
| | RSKSNNYATYYAPSFQGQVTISADKSISTAYLQWSSLKASDTAMYYCVRHG |
| | DGNLWYIDVWGQGTLVTVSS (SEQ ID NO: 445) |
| 7F8V1-46 | QVQLVQSGAEVKKPGASVKVSCKASGFSFNTYAMNWVRQAPGQGLEWIAR |
| | IRSKSNNYATYYAQKFQGRVTMTRDTSTSTVYMELSSLRSEDTAVYYCVRH |
| | GDGNLWYIDVWGQGTLVTVSS (SEQ ID NO: 446) |
| 7F8V4-59 | QVQLQESGPGLVKPSETLSLTCTVSGFSFNTYAMNWIRQPPGKGLEWIARIRS |
| | KSNNYATYYAPSLKSRVTISVDTSKNQFSLKLSSVTAADTAVYYCVRHGDGN |
| | LWYIDVWGQGTLVTVSS (SEQ ID NO: 447) |
| 7F8V4-30-4 | QVQLQESGPGLVKPSQTLSLTCTVSGFSFNTYAMNWIRQPPGKGLEWIARIRS |
| | KSNNYATYYAPSLKSRVTISVDTSKNQFSLKLSSVTAADTAVYYCVRHGDGN |
| | LWYIDVWGQGTLVTVSS (SEQ ID NO: 448) |
| Antibody 8F8 | Antibody 8F8 |
| 8F8V1-46 | QVQLVQSGAEVKKPGASVKVSCKASGYTVSRYWMHWVRQAPGQGLEWIG |
| | RIDPNSGGTKYNQKFQGRVTMTRDTSTSTVYMELSSLRSEDTAVYYCVLTG |
| | TDFDYWGQGTLVTVSS (SEQ ID NO: 450) |
| 8F8V3-23 | EVQLLESGGGLVQPGGSLRLSCAASGYTVSRYWMHWVRQAPGKGLEWIGR |
| | IDPNSGGTKYNDSVKGRFTISRDNSKNTLYLQMNSLRAEDTAVYYCVLTGT |
| | DFDYWGQGTLVTVSS (SEQ ID NO: 451) |
| 8F8V1-69 | QVQLVQSGAEVKKPGSSVKVSCKASGYTVSRYWMHWVRQAPGQGLEWIG |
| | RIDPNSGGTKYNQKFQGRVTITADESTSTAYMELSSLRSEDTAVYYCVLTGT |
| | DFDYWGQGTLVTVSS (SEQ ID NO: 452) |
| 8F8V5-51 | EVQLVQSGAEVKKPGESLKISCKGSGYTVSRYWMHWVRQMPGKGLEWIGR |
| | IDPNSGGTKYNPSFQGQVTISADKSISTAYLQWSSLKASDTAMYYCVLTGTD |
| | FDYWGQGTLVTVSS (SEQ ID NO: 453) |
| 8F8V3-48 | EVQLVESGGGLVQPGGSLRLSCAASGYTVSRYWMHWVRQAPGKGLEWIGR |
| | IDPNSGGTKYNDSVKGRFTISRDNAKNSLYLQMNSLRAEDTAVYYCVLTGT |
| | DFDYWGQGTLVTVSS (SEQ ID NO: 454) |
| 8F8V3-30 | QVQLVESGGGVVQPGRSLRLSCAASGYTVSRYWMHWVRQAPGKGLEWIGR |
| | IDPNSGGTKYNDSVKGRFTISRDNSKNTLYLQMNSLRAEDTAVYYCVLTGT |
| | DFDYWGQGTLVTVSS (SEQ ID NO: 455) |
| 8F8V3-7 | EVQLVESGGGLVQPGGSLRLSCAASGYTVSRYWMHWVRQAPGKGLEWIGR |
| | IDPNSGGTKYNDSVKGRFTISRDNAKNSLYLQMNSLRAEDTAVYYCVLTGT |
| | DFDYWGQGTLVTVSS (SEQ ID NO: 454) |
| 8F8V4-59 | QVQLQESGPGLVKPSETLSLTCTVSGYTVSRYWMHWIRQPPGKGLEWIGRID |
| | PNSGGTKYNPSLKSRVTISVDTSKNQFSLKLSSVTAADTAVYYCVLTGTDFD |
| | YWGQGTLVTVSS (SEQ ID NO: 456) |
| 8F8V3-15 | EVQLVESGGGLVKPGGSLRLSCAASGYTVSRYWMHWVRQAPGKGLEWIGR |
| | IDPNSGGTKYNAPVKGRFTISRDDSKNTLYLQMNSLKTEDTAVYYCVLTGT |
| | DFDYWGQGTLVTVSS (SEQ ID NO: 457) |
| 8F8V4-30-4 | QVQLQESGPGLVKPSQTLSLTCTVSGYTVSRYWMHWIRQPPGKGLEWIGRID |
| | PNSGGTKYNPSLKSRVTISVDTSKNQFSLKLSSVTAADTAVYYCVLTGTDFD |
| | YWGQGTLVTVSS (SEQ ID NO: 458) |
| Antibody 1H7 | Antibody 1H7 |
| 1H7V3-15 | EVQLVESGGGLVKPGGSLRLSCAASGFSFNTYAMNWVRQAPGKGLEWIARI |
| | RSKSNNYATYYAAPVKGRFTISRDDSKNTLYLQMNSLKTEDTAVYYCVRHG |
| | DGNLWYIDVWGQGTLVTVSS (SEQ ID NO: 440) |
| 1H7V3-23 | EVQLLESGGGLVQPGGSLRLSCAASGFSFNTYAMNWVRQAPGKGLEWIARI |
| | RSKSNNYATYYADSVKGRFTISRDNSKNTLYLQMNSLRAEDTAVYYCVRHG |
| | DGNLWYIDVWGQGTLVTVSS (SEQ ID NO: 442) |
| 1H7V3-48 | EVQLVESGGGLVQPGGSLRLSCAASGFSFNTYAMNWVRQAPGKGLEWIARI |
| | RSKSNNYATYYADSVKGRFTISRDNAKNSLYLQMNSLRAEDTAVYYCVRHG |
| | DGNLWYIDVWGQGTLVTVSS (SEQ ID NO: 441) |
| 1H7V3-7 | EVQLVESGGGLVQPGGSLRLSCAASGFSFNTYAMNWVRQAPGKGLEWIARI |
| | RSKSNNYATYYADSVKGRFTISRDNAKNSLYLQMNSLRAEDTAVYYCVRHG |
| | DGNLWYIDVWGQGTLVTVSS (SEQ ID NO: 441) |
| 1H7V3-30 | QVQLVESGGGVVQPGRSLRLSCAASGFSFNTYAMNWVRQAPGKGLEWIARI |
| | RSKSNNYATYYADSVKGRFTISRDNSKNTLYLQMNSLRAEDTAVYYCVRHG |
| | DGNLWYIDVWGQGTLVTVSS (SEQ ID NO: 443) |
| 1H7V5-51 | EVQLVQSGAEVKKPGESLKISCKGSGFSFNTYAMNWVRQMPGKGLEWIARI |
| | RSKSNNYATYYAPSFQGQVTISADKSISTAYLQWSSLKASDTAMYYCVRHG |
| | DGNLWYIDVWGQGTLVTVSS (SEQ ID NO: 445) |
| 1H7V1-69 | QVQLVQSGAEVKKPGSSVKVSCKASGFSFNTYAMNWVRQAPGQGLEWIARI |
| | RSKSNNYATYYAQKFQGRVTITADESTSTAYMELSSLRSEDTAVYYCVRHG |
| | DGNLWYIDVWGQGTLVTVSS (SEQ ID NO: 444) |
| 1H7V1-46 | QVQLVQSGAEVKKPGASVKVSCKASGFSFNTYAMNWVRQAPGQGLEWIAR |
| | IRSKSNNYATYYAQKFQGRVTMTRDTSTSTVYMELSSLRSEDTAVYYCVRH |
| | GDGNLWYIDVWGQGTLVTVSS (SEQ ID NO: 446) |
| 1H7V4-59 | QVQLQESGPGLVKPSETLSLTCTVSGFSFNTYAMNWIRQPPGKGLEWIARIRS |
| | KSNNYATYYAPSLKSRVTISVDTSKNQFSLKLSSVTAADTAVYYCVRHGDGN |
| | LWYIDVWGQGTLVTVSS (SEQ ID NO: 447) |
| 1H7V4-30-4 | QVQLQESGPGLVKPSQTLSLTCTVSGFSFNTYAMNWIRQPPGKGLEWIARIRS |
| | KSNNYATYYAPSLKSRVTISVDTSKNQFSLKLSSVTAADTAVYYCVRHGDGN |
| | LWYIDVWGQGTLVTVSS (SEQ ID NO: 448) |
| Antibody 2H8 | Antibody 2H8 |
| 2H8V3-15 | EVQLVESGGGLVKPGGSLRLSCAASGFSFNTYAMNWVRQAPGKGLEWIARI |
| | RSKSNNYATYYAAPVKGRFTISRDDSKNTLYLQMNSLKTEDTAVYYCVRHG |
| | DGNLWYIDVWGQGTLVTVSS (SEQ ID NO: 440) |
| 2H8V3-48 | EVQLVESGGGLVQPGGSLRLSCAASGFSFNTYAMNWVRQAPGKGLEWIARI |
| | RSKSNNYATYYADSVKGRFTISRDNAKNSLYLQMNSLRAEDTAVYYCVRHG |
| | DGNLWYIDVWGQGTLVTVSS (SEQ ID NO: 441) |
| 2H8V3-23 | EVQLLESGGGLVQPGGSLRLSCAASGFSFNTYAMNWVRQAPGKGLEWIARI |
| | RSKSNNYATYYADSVKGRFTISRDNSKNTLYLQMNSLRAEDTAVYYCVRHG |
| | DGNLWYIDVWGQGTLVTVSS (SEQ ID NO: 442) |
| 2H8V3-7 | EVQLVESGGGLVQPGGSLRLSCAASGFSFNTYAMNWVRQAPGKGLEWIARI |
| | RSKSNNYATYYADSVKGRFTISRDNAKNSLYLQMNSLRAEDTAVYYCVRHG |
| | DGNLWYIDVWGQGTLVTVSS (SEQ ID NO: 441) |
| 2H8V3-30 | QVQLVESGGGVVQPGRSLRLSCAASGFSFNTYAMNWVRQAPGKGLEWIARI |
| | RSKSNNYATYYADSVKGRFTISRDNSKNTLYLQMNSLRAEDTAVYYCVRHG |
| | DGNLWYIDVWGQGTLVTVSS (SEQ ID NO: 443) |
| 2H8V5-51 | EVQLVQSGAEVKKPGESLKISCKGSGFSFNTYAMNWVRQMPGKGLEWIARI |
| | RSKSNNYATYYAPSFQGQVTISADKSISTAYLQWSSLKASDTAMYYCVRHG |
| | DGNLWYIDVWGQGTLVTVSS (SEQ ID NO: 445) |
| 2H8V1-69 | QVQLVQSGAEVKKPGSSVKVSCKASGFSFNTYAMNWVRQAPGQGLEWIARI |
| | RSKSNNYATYYAQKFQGRVTITADESTSTAYMELSSLRSEDTAVYYCVRHG |
| | DGNLWYIDVWGQGTLVTVSS (SEQ ID NO: 444) |
| 2H8V1-46 | QVQLVQSGAEVKKPGASVKVSCKASGFSFNTYAMNWVRQAPGQGLEWIAR |
| | IRSKSNNYATYYAQKFQGRVTMTRDTSTSTVYMELSSLRSEDTAVYYCVRH |
| | GDGNLWYIDVWGQGTLVTVSS (SEQ ID NO: 446) |
| 2H8V4-59 | QVQLQESGPGLVKPSETLSLTCTVSGFSFNTYAMNWIRQPPGKGLEWIARIRS |
| | KSNNYATYYAPSLKSRVTISVDTSKNQFSLKLSSVTAADTAVYYCVRHGDGN |
| | LWYIDVWGQGTLVTVSS (SEQ ID NO: 447) |
| 2H8V4-30-4 | QVQLQESGPGLVKPSQTLSLTCTVSGFSFNTYAMNWIRQPPGKGLEWIARIRS |
| | KSNNYATYYAPSLKSRVTISVDTSKNQFSLKLSSVTAADTAVYYCVRHGDGN |
| | LWYIDVWGQGTLVTVSS (SEQ ID NO: 448) |
| Antibody 3A2 | Antibody 3A2 |
| 3A2V5-51 | EVQLVQSGAEVKKPGESLKISCKGSGYPFSNFWITWVRQMPGKGLEWIGDIY |
| | PGSDNSNYNPSFQGQVTISADKSISTAYLQWSSLKASDTAMYYCAREAYYTN |
| | PGFAYWGQGTLVTVSS (SEQ ID NO: 462) |
| 3A2V1-69 | QVQLVQSGAEVKKPGSSVKVSCKASGYPFSNFWITWVRQAPGQGLEWIGDI |
| | YPGSDNSNYNQKFQGRVTITADESTSTAYMELSSLRSEDTAVYYCAREAYYT |
| | NPGFAYWGQGTLVTVSS (SEQ ID NO: 463) |
| 3A2V1-46 | QVQLVQSGAEVKKPGASVKVSCKASGYPFSNFWITWVRQAPGQGLEWIGDI |
| | YPGSDNSNYNQKFQGRVTMTRDTSTSTVYMELSSLRSEDTAVYYCAREAYY |
| | TNPGFAYWGQGTLVTVSS (SEQ ID NO: 464) |
| 3A2V3-48 | EVQLVESGGGLVQPGGSLRLSCAASGYPFSNFWITWVRQAPGKGLEWIGDIY |
| | PGSDNSNYNDSVKGRFTISRDNAKNSLYLQMNSLRAEDTAVYYCAREAYYT |
| | NPGFAYWGQGTLVTVSS (SEQ ID NO: 465) |
| 3A2V3-30 | QVQLVESGGGVVQPGRSLRLSCAASGYPFSNFWITWVRQAPGKGLEWIGDI |
| | YPGSDNSNYNDSVKGRFTISRDNSKNTLYLQMNSLRAEDTAVYYCAREAYY |
| | TNPGFAYWGQGTLVTVSS (SEQ ID NO: 466) |
| 3A2V3-7 | EVQLVESGGGLVQPGGSLRLSCAASGYPFSNFWITWVRQAPGKGLEWIGDIY |
| | PGSDNSNYNDSVKGRFTISRDNAKNSLYLQMNSLRAEDTAVYYCAREAYYT |
| | NPGFAYWGQGTLVTVSS (SEQ ID NO: 465) |
| 3A2V3-23 | EVQLLESGGGLVQPGGSLRLSCAASGYPFSNFWITWVRQAPGKGLEWIGDIY |
| | PGSDNSNYNDSVKGRFTISRDNSKNTLYLQMNSLRAEDTAVYYCAREAYYT |
| | NPGFAYWGQGTLVTVSS (SEQ ID NO: 467) |
| 3A2V4-59 | QVQLQESGPGLVKPSETLSLTCTVSGYPFSNFWITWIRQPPGKGLEWIGDIYP |
| | GSDNSNYNPSLKSRVTISVDTSKNQFSLKLSSVTAADTAVYYCAREAYYTNP |
| | GFAYWGQGTLVTVSS (SEQ ID NO: 468) |
| IGHV3-15 | EVQLVESGGGLVKPGGSLRLSCAASGYPFSNFWITWVRQAPGKGLEWIGDIY |
| | PGSDNSNYNAPVKGRFTISRDDSKNTLYLQMNSLKTEDTAVYYCAREAYYT |
| | NPGFAYWGQGTLVTVSS (SEQ ID NO: 469) |
| 3A2V4-39 | QLQLQESGPGLVKPSETLSLTCTVSGYPFSNFWITWIRQPPGKGLEWIGDIYP |
| | GSDNSNYNPSLKSRVTISVDTSKNQFSLKLSSVTAADTAVYYCAREAYYTNP |
| | GFAYWGQGTLVTVSS (SEQ ID NO: 470) |
| Antibody 3A7 | Antibody 3A7 |
| 3A7V3-15 | EVQLVESGGGLVKPGGSLRLSCAASGFTFSDAWMGWVRQAPGKGLEWVAE |
| | IRDKVKNHATYYAAPVKGRFTISRDDSKNTLYLQMNSLKTEDTAVYYCRLG |
| | VFDYWGQGTLVTVSS (SEQ ID NO: 430) |
| 3A7V3-7 | EVQLVESGGGLVQPGGSLRLSCAASGFTFSDAWMGWVRQAPGKGLEWVAE |
| | IRDKVKNHATYYADSVKGRFTISRDNAKNSLYLQMNSLRAEDTAVYYCRLG |
| | VFDYWGQGTLVTVSS (SEQ ID NO: 431) |
| 3A7V3-23 | EVQLLESGGGLVQPGGSLRLSCAASGFTFSDAWMGWVRQAPGKGLEWVAE |
| | IRDKVKNHATYYADSVKGRFTISRDNSKNTLYLQMNSLRAEDTAVYYCRLG |
| | VFDYWGQGTLVTVSS (SEQ ID NO: 432) |
| 3A7V3-48 | EVQLVESGGGLVQPGGSLRLSCAASGFTFSDAWMGWVRQAPGKGLEWVAE |
| | IRDKVKNHATYYADSVKGRFTISRDNAKNSLYLQMNSLRAEDTAVYYCRLG |
| | VFDYWGQGTLVTVSS (SEQ ID NO: 431) |
| 3A7V3-30 | QVQLVESGGGVVQPGRSLRLSCAASGFTFSDAWMGWVRQAPGKGLEWVAE |
| | IRDKVKNHATYYADSVKGRFTISRDNSKNTLYLQMNSLRAEDTAVYYCRLG |
| | VFDYWGQGTLVTVSS (SEQ ID NO: 433) |
| 3A7V1-69 | QVQLVQSGAEVKKPGSSVKVSCKASGFTFSDAWMGWVRQAPGQGLEWVA |
| | EIRDKVKNHATYYAQKFQGRVTITADESTSTAYMELSSLRSEDTAVYYCRLG |
| | VFDYWGQGTLVTVSS (SEQ ID NO: 434) |
| 3A7V1-46 | QVQLVQSGAEVKKPGASVKVSCKASGFTFSDAWMGWVRQAPGQGLEWVA |
| | EIRDKVKNHATYYAQKFQGRVTMTRDTSTSTVYMELSSLRSEDTAVYYCRL |
| | GVFDYWGQGTLVTVSS (SEQ ID NO: 435) |
| 3A7V5-51 | EVQLVQSGAEVKKPGESLKISCKGSGFTFSDAWMGWVRQMPGKGLEWVAE |
| | IRDKVKNHATYYAPSFQGQVTISADKSISTAYLQWSSLKASDTAMYYCRLG |
| | VFDYWGQGTLVTVSS (SEQ ID NO: 436) |
| 3A7V4-59 | QVQLQESGPGLVKPSETLSLTCTVSGFTFSDAWMGWIRQPPGKGLEWVAEIR |
| | DKVKNHATYYAPSLKSRVTISVDTSKNQFSLKLSSVTAADTAVYYCRLGVFD |
| | YWGQGTLVTVSS (SEQ ID NO: 437) |
| 3A7V4-39 | QLQLQESGPGLVKPSETLSLTCTVSGFTFSDAWMGWIRQPPGKGLEWVAEIR |
| | DKVKNHATYYAPSLKSRVTISVDTSKNQFSLKLSSVTAADTAVYYCRLGVFD |
| | YWGQGTLVTVSS (SEQ ID NO: 438) |
| Antibody 3B10 | Antibody 3B10 |
| 3B10V3-15 | EVQLVESGGGLVKPGGSLRLSCAASGLTSNTYTQTWVRQAPGKGLEWESVI |
| | RSKSNNFSTLYAAPVKGRFTISRDDSKNTLYLQMNSLKTEDTAVYYCVRHKS |
| | NRYPGVYWGQGTLVTVSS (SEQ ID NO: 472) |
| 3B10V3-30 | QVQLVESGGGVVQPGRSLRLSCAASGLTSNTYTQTWVRQAPGKGLEWESVI |
| | RSKSNNFSTLYADSVKGRFTISRDNSKNTLYLQMNSLRAEDTAVYYCVRHKS |
| | NRYPGVYWGQGTLVTVSS (SEQ ID NO: 473) |
| 3B10V3-23 | EVQLLESGGGLVQPGGSLRLSCAASGLTSNTYTQTWVRQAPGKGLEWESVI |
| | RSKSNNFSTLYADSVKGRFTISRDNSKNTLYLQMNSLRAEDTAVYYCVRHKS |
| | NRYPGVYWGQGTLVTVSS (SEQ ID NO: 474) |
| 3B10V1-46 | QVQLVQSGAEVKKPGASVKVSCKASGLTSNTYTQTWVRQAPGQGLEWESVI |
| | RSKSNNFSTLYAQKFQGRVTMTRDTSTSTVYMELSSLRSEDTAVYYCVRHK |
| | SNRYPGVYWGQGTLVTVSS (SEQ ID NO: 475) |
| 3B10V3-48 | EVQLVESGGGLVQPGGSLRLSCAASGLTSNTYTQTWVRQAPGKGLEWESVI |
| | RSKSNNESTLYADSVKGRFTISRDNAKNSLYLQMNSLRAEDTAVYYCVRHK |
| | SNRYPGVYWGQGTLVTVSS (SEQ ID NO: 476) |
| 3B10V1-69 | QVQLVQSGAEVKKPGSSVKVSCKASGLTSNTYTQTWVRQAPGQGLEWESVI |
| | RSKSNNFSTLYAQKFQGRVTITADESTSTAYMELSSLRSEDTAVYYCVRHKS |
| | NRYPGVYWGQGTLVTVSS (SEQ ID NO: 477) |
| 3B10V3-7 | EVQLVESGGGLVQPGGSLRLSCAASGLTSNTYTQTWVRQAPGKGLEWESVI |
| | RSKSNNFSTLYADSVKGRFTISRDNAKNSLYLQMNSLRAEDTAVYYCVRHK |
| | SNRYPGVYWGQGTLVTVSS (SEQ ID NO: 476) |
| 3B10V5-51 | EVQLVQSGAEVKKPGESLKISCKGSGLTSNTYTQTWVRQMPGKGLEWESVI |
| | RSKSNNFSTLYAPSFQGQVTISADKSISTAYLQWSSLKASDTAMYYCVRHKS |
| | NRYPGVYWGQGTLVTVSS (SEQ ID NO: 478) |
| 3B10V4-59 | QVQLQESGPGLVKPSETLSLTCTVSGLTSNTYTQTWIRQPPGKGLEWESVIRS |
| | KSNNFSTLYAPSLKSRVTISVDTSKNQFSLKLSSVTAADTAVYYCVRHKSNR |
| | YPGVYWGQGTLVTVSS (SEQ ID NO: 479) |
| 3B10V4-39 | QLQLQESGPGLVKPSETLSLTCTVSGLTSNTYTQTWIRQPPGKGLEWESVIRS |
| | KSNNFSTLYAPSLKSRVTISVDTSKNQFSLKLSSVTAADTAVYYCVRHKSNR |
| | YPGVYWGQGTLVTVSS (SEQ ID NO: 480) |
| Antibody 4F11 | Antibody 4F11 |
| 4F11V5-51 | EVQLVQSGAEVKKPGESLKISCKGSGYPFSNFWITWVRQMPGKGLEWIGDIY |
| | PGSDNSNYNPSFQGQVTISADKSISTAYLQWSSLKASDTAMYYCAREAYYTN |
| | PGFAYWGQGTLVTVSS (SEQ ID NO: 462) |
| 4F11V1-69 | QVQLVQSGAEVKKPGSSVKVSCKASGYPFSNFWITWVRQAPGQGLEWIGDI |
| | YPGSDNSNYNQKFQGRVTITADESTSTAYMELSSLRSEDTAVYYCAREAYYT |
| | NPGFAYWGQGTLVTVSS (SEQ ID NO: 463) |
| 4F11V1-46 | QVQLVQSGAEVKKPGASVKVSCKASGYPFSNFWITWVRQAPGQGLEWIGDI |
| | YPGSDNSNYNQKFQGRVTMTRDTSTSTVYMELSSLRSEDTAVYYCAREAYY |
| | TNPGFAYWGQGTLVTVSS (SEQ ID NO: 464) |
| 4F11V3-48 | EVQLVESGGGLVQPGGSLRLSCAASGYPFSNFWITWVRQAPGKGLEWIGDIY |
| | PGSDNSNYNDSVKGRFTISRDNAKNSLYLQMNSLRAEDTAVYYCAREAYYT |
| | NPGFAYWGQGTLVTVSS (SEQ ID NO: 465) |
| 4F11V3-30 | QVQLVESGGGVVQPGRSLRLSCAASGYPFSNFWITWVRQAPGKGLEWIGDI |
| | YPGSDNSNYNDSVKGRFTISRDNSKNTLYLQMNSLRAEDTAVYYCAREAYY |
| | TNPGFAYWGQGTLVTVSS (SEQ ID NO: 466) |
| 4F11V3-7 | EVQLVESGGGLVQPGGSLRLSCAASGYPFSNFWITWVRQAPGKGLEWIGDIY |
| | PGSDNSNYNDSVKGRFTISRDNAKNSLYLQMNSLRAEDTAVYYCAREAYYT |
| | NPGFAYWGQGTLVTVSS (SEQ ID NO: 465) |
| 4F11V3-23 | EVQLLESGGGLVQPGGSLRLSCAASGYPFSNFWITWVRQAPGKGLEWIGDIY |
| | PGSDNSNYNDSVKGRFTISRDNSKNTLYLQMNSLRAEDTAVYYCAREAYYT |
| | NPGFAYWGQGTLVTVSS (SEQ ID NO: 467) |
| 4F11V4-59 | QVQLQESGPGLVKPSETLSLTCTVSGYPFSNFWITWIRQPPGKGLEWIGDIYP |
| | GSDNSNYNPSLKSRVTISVDTSKNQFSLKLSSVTAADTAVYYCAREAYYTNP |
| | GFAYWGQGTLVTVSS (SEQ ID NO: 468) |
| 4F11V3-15 | EVQLVESGGGLVKPGGSLRLSCAASGYPFSNFWITWVRQAPGKGLEWIGDIY |
| | PGSDNSNYNAPVKGRFTISRDDSKNTLYLQMNSLKFEDTAVYYCAREAYYT |
| | NPGFAYWGQGTLVTVSS (SEQ ID NO: 469) |
| 4F11V4-39 | QLQLQESGPGLVKPSETLSLTCTVSGYPFSNFWITWIRQPPGKGLEWIGDIYP |
| | GSDNSNYNPSLKSRVTISVDTSKNQFSLKLSSVTAADTAVYYCAREAYYTNP |
| | GFAYWGQGTLVTVSS (SEQ ID NO: 470) |
| Antibody 6H6 | Antibody 6H6 |
| 6H6V3-15 | EVQLVESGGGLVKPGGSLRLSCAASGFTFSDAWMDWVRQAPGKGLEWWV |
| | AEIRNKVNNHATYYAPVKGRFTISRDDSKNTLYLQMNSLKTEDTAVYYCCT |
| | SLYDGYYLRFAWGQGTLVTVSS (SEQ ID NO: 482) |
| 6H6V3-7 | EVQLVESGGGLVQPGGSLRLSCAASGFTFSDAWMDWVRQAPGKGLEWWV |
| | AEIRNKVNNHATYYDSVKGRFTISRDNAKNSLYLQMNSLRAEDTAVYYCCT |
| | SLYDGYYLRFAWGQGTLVTVSS (SEQ ID NO: 483) |
| 6H6V3-23 | EVQLLESGGGLVQPGGSLRLSCAASGFTFSDAWMDWVRQAPGKGLEWWVA |
| | EIRNKVNNHATYYDSVKGRFTISRDNSKNTLYLQMNSLRAEDTAVYYCCTS |
| | LYDGYYLRFAWGQGTLVTVSS (SEQ ID NO: 484) |
| 6H6V3-48 | EVQLVESGGGLVQPGGSLRLSCAASGFTFSDAWMDWVRQAPGKGLEWWV |
| | AEIRNKVNNHATYYDSVKGRFTISRDNAKNSLYLQMNSLRAEDTAVYYCCT |
| | SLYDGYYLRFAWGQGTLVTVSS (SEQ ID NO: 483) |
| 6H6V3-30 | QVQLVESGGGVVQPGRSLRLSCAASGFTFSDAWMDWVRQAPGKGLEWWV |
| | AEIRNKVNNHATYYDSVKGRFTISRDNSKNTLYLQMNSLRAEDTAVYYCCT |
| | SLYDGYYLRFAWGQGTLVTVSS (SEQ ID NO: 485) |
| 6H6V1-46 | QVQLVQSGAEVKKPGASVKVSCKASGFTFSDAWMDWVRQAPGQGLEWWV |
| | AEIRNKVNNHATYYQKFQGRVTMTRDTSTSTVYMELSSLRSEDTAVYYCCT |
| | SLYDGYYLRFAWGQGTLVTVSS (SEQ ID NO: 486) |
| 6H6V1-69 | QVQLVQSGAEVKKPGSSVKVSCKASGFTFSDAWMDWVRQAPGQGLEWWV |
| | AEIRNKVNNHATYYQKFQGRVTITADESTSTAYMELSSLRSEDTAVYYCCTS |
| | LYDGYYLRFAWGQGTLVTVSS (SEQ ID NO: 487) |
| 6H6V5-51 | EVQLVQSGAEVKKPGESLKISCKGSGFTFSDAWMDWVRQMPGKGLEWWVA |
| | EIRNKVNNHATYYPSFQGQVTISADKSISTAYLQWSSLKASDTAMYYCCTSL |
| | YDGYYLRFAWGQGTLVTVSS (SEQ ID NO: 488) |
| 6H6V4-59 | QVQLQESGPGLVKPSETLSLTCTVSGFTFSDAWMDWIRQPPGKGLEWWVAE |
| | IRNKVNNHATYYPSLKSRVTISVDTSKNQFSLKLSSVTAADTAVYYCCTSLY |
| | DGYYLRFAWGQGTLVTVSS (SEQ ID NO: 489) |
| 6H6V4-39 | QLQLQESGPGLVKPSETLSLTCTVSGFTFSDAWMDWIRQPPGKGLEWWVAEI |
| | RNKVNNHATYYPSLKSRVTISVDTSKNQFSLKLSSVTAADTAVYYCCTSLYD |
| | GYYLRFAWGQGTLVTVSS (SEQ ID NO: 490) |
| Antibody7A9 | Antibody 7A9 |
| 7A9V3-15 | EVQLVESGGGLVKPGGSLRLSCAASGFTFNTYSMNWVRQAPGKGLEWVAHI |
| | KTKZNNFATFYAAPVKGRFTISRDDSKNTLYLQMNSLKTEDTAVYYCVZHZ |
| | SNNYPFAYWGQGTLVTVSS (SEQ ID NO: 492) |
| 7A9V3-48 | EVQLVESGGGLVQPGGSLRLSCAASGFTFNTYSMNWVRQAPGKGLEWVAHI |
| | KTKZNNFATFYADSVKGRFTISRDNAKNSLYLQMNSLRAEDTAVYYCVZHZ |
| | SNNYPFAYWGQGTLVTVSS (SEQ ID NO: 493) |
| 7A9V3-23 | EVQLLESGGGLVQPGGSLRLSCAASGFTFNTYSMNWVRQAPGKGLEWVAHI |
| | KTKZNNFATFYADSVKGRFTISRDNSKNTLYLQMNSLRAEDTAVYYCVZHZ |
| | SNNYPFAYWGQGTLVTVSS (SEQ ID NO: 494) |
| 7A9V3-7 | EVQLVESGGGLVQPGGSLRLSCAASGFTFNTYSMNWVRQAPGKGLEWVAHI |
| | KTKZNNFATFYADSVKGRFTISRDNAKNSLYLQMNSLRAEDTAVYYCVZHZ |
| | SNNYPFAYWGQGTLVTVSS (SEQ ID NO: 493) |
| 7A9V3-30 | QVQLVESGGGVVQPGRSLRLSCAASGFTFNTYSMNWVRQAPGKGLEWVAH |
| | IKTKZNNFATFYADSVKGRFTISRDNSKNTLYLQMNSLRAEDTAVYYCVZH |
| | ZSNNYPFAYWGQGTLVTVSS (SEQ ID NO: 495) |
| 7A9V1-46 | QVQLVQSGAEVKKPGASVKVSCKASGFTFNTYSMNWVRQAPGQGLEWVAH |
| | IKTKZNNFATFYAQKFQGRVTMTRDTSTSTVYMELSSLRSEDTAVYYCVZH |
| | ZSNNYPFAYWGQGTLVTVSS (SEQ ID NO: 496) |
| 7A9V1-69 | QVQLVQSGAEVKKPGSSVKVSCKASGFTFNTYSMNWVRQAPGQGLEWVAH |
| | IKTKZNNFATFYAQKFQGRVTITADESTSTAYMELSSLRSEDTAVYYCVZHZ |
| | SNNYPFAYWGQGTLVTVSS (SEQ ID NO: 497) |
| 7A9V5-51 | EVQLVQSGAEVKKPGESLKISCKGSGFTFNTYSMNWVRQMPGKGLEWVAHI |
| | KTKZNNFATFYAPSFQGQVTISADKSISTAYLQWSSLKASDTAMYYCVZHZS |
| | NNYPFAYWGQGTLVTVSS (SEQ ID NO: 498) |
| 7A9V4-59 | QVQLQESGPGLVKPSETLSLTCTVSGFTFNTYSMNWIRQPPGKGLEWVAHIK |
| | TKZNNFATFYAPSLKSRVTISVDTSKNQFSLKLSSVTAADTAVYYCVZHZSN |
| | NYPFAYWGQGTLVTVSS (SEQ ID NO: 499) |
| 7A9V4-30-4 | QVQLQESGPGLVKPSQTLSLTCTVSGFTFNTYSMNWIRQPPGKGLEWVAHIK |
| | TKZNNFATFYAPSLKSRVTISVDTSKNQFSLKLSSVTAADTAVYYCVZHZSN |
| | NYPFAYWGQGTLVTVSS (SEQ ID NO: 500) |
| Antibody 7B3 | Antibody 7B3 |
| 7B3V1-46 | QVQLVQSGAEVKKPGASVKVSCKASGYTFTTYWIHWVRQAPGQGLEWIGR |
| | NDPNSGGSNYNQKFQGRVTMTRDTSTSTVYMELSSLRSEDTAVYYCVRTNW |
| | DGDFWGQGTLVTVSS (SEQ ID NO: 502) |
| 7B3V5-51 | EVQLVQSGAEVKKPGESLKISCKGSGYTFTTYWIHWVRQMPGKGLEWIGRN |
| | DPNSGGSNYNPSFQGQVTISADKSISTAYLQWSSLKASDTAMYYCVRTNWD |
| | GDFWGQGTLVTVSS (SEQ ID NO: 503) |
| 7B3V1-69 | QVQLVQSGAEVKKPGSSVKVSCKASGYTFTTYWIHWVRQAPGQGLEWIGR |
| | NDPNSGGSNYNQKFQGRVTITADESTSTAYMELSSLRSEDTAVYYCVRTNW |
| | DGDFWGQGTLVTVSS (SEQ ID NO: 504) |
| 7B3V3-23 | EVQLLESGGGLVQPGGSLRLSCAASGYTFTTYWIHWVRQAPGKGLEWIGRN |
| | DPNSGGSNYNDSVKGRFTISRDNSKNTLYLQMNSLRAEDTAVYYCVRTNWD |
| | GDFWGQGTLVTVSS (SEQ ID NO: 505) |
| 7B3V3-7 | EVQLVESGGGLVQPGGSLRLSCAASGYTFTTYWIHWVRQAPGKGLEWIGRN |
| | DPNSGGSNYNDSVKGRFTISRDNAKNSLYLQMNSLRAEDTAVYYCVRTNWD |
| | GDFWGQGTLVTVSS (SEQ ID NO: 506) |
| 7B3V3-30 | QVQLVESGGGVVQPGRSLRLSCAASGYTFTTYWIHWVRQAPGKGLEWIGR |
| | NDPNSGGSNYNDSVKGRFTISRDNSKNTLYLQMNSLRAEDTAVYYCVRTNW |
| | DGDFWGQGTLVTVSS (SEQ ID NO: 507) |
| 7B3V3-48 | EVQLVESGGGLVQPGGSLRLSCAASGYTFTTYWIHWVRQAPGKGLEWIGRN |
| | DPNSGGSNYNDSVKGRFTISRDNAKNSLYLQMNSLRAEDTAVYYCVRTNWD |
| | GDFWGQGTLVTVSS (SEQ ID NO: 506) |
| 7B3V4-59 | QVQLQESGPGLVKPSETLSLTCTVSGYTFTTYWIHWIRQPPGKGLEWIGRND |
| | PNSGGSNYNPSLKSRVTISVDTSKNQFSLKLSSVTAADTAVYYCVRTNWDGD |
| | FWGQGTLVTVSS (SEQ ID NO: 508) |
| 7B3V3-15 | EVQLVESGGGLVKPGGSLRLSCAASGYTFTTYWIHWVRQAPGKGLEWIGRN |
| | DPNSGGSNYNAPVKGRFTISRDDSKNTLYLQMNSLKTEDTAVYYCVRTNWD |
| | GDFWGQGTLVTVSS (SEQ ID NO: 509) |
| 7B3V4-30-4 | QVQLQESGPGLVKPSQTLSLTCTVSGYTFTTYWIHWIRQPPGKGLEWIGRND |
| | PNSGGSNYNPSLKSRVTISVDTSKNQFSLKLSSVTAADTAVYYCVRTNWDGD |
| | FWGQGTLVTVSS (SEQ ID NO: 510) |
| Antibody 8A1 | Antibody 8A1 |
| 8A1V5-51 | EVQLVQSGAEVKKPGESLKISCKGSGYAFSNYWMSWVRQMPGKGLEWIGQI |
| | YPGDGDTKYNPSFQGQVTISADKSISTAYLQWSSLKASDTAMYYCSREKGA |
| | DYYGSTYSAWFSYWGQGTLVTVSS (SEQ ID NO: 512) |
| 8A1V1-46 | QVQLVQSGAEVKKPGASVKVSCKASGYAFSNYWMSWVRQAPGQGLEWIG |
| | QIYPGDGDTKYNQKFQGRVTMTRDTSTSTVYMELSSLRSEDTAVYYCSREK |
| | GADYYGSTYSAWFSYWGQGTLVTVSS (SEQ ID NO: 513) |
| 8A1V3-23 | EVQLLESGGGLVQPGGSLRLSCAASGYAFSNYWMSWVRQAPGKGLEWIGQI |
| | YPGDGDTKYNDSVKGRFTISRDNSKNTLYLQMNSLRAEDTAVYYCSREKGA |
| | DYYGSTYSAWFSYWGQGTLVTVSS (SEQ ID NO: 514) |
| 8A1V1-69 | QVQLVQSGAEVKKPGSSVKVSCKASGYAFSNYWMSWVRQAPGQGLEWIGQ |
| | IYPGDGDTKYNQKFQGRVTITADESTSTAYMELSSLRSEDTAVYYCSREKGA |
| | DYYGSTYSAWFSYWGQGTLVTVSS (SEQ ID NO: 515) |
| 8A1V3-7 | EVQLVESGGGLVQPGGSLRLSCAASGYAFSNYWMSWVRQAPGKGLEWIGQI |
| | YPGDGDTKYNDSVKGRFTISRDNAKNSLYLQMNSLRAEDTAVYYCSREKGA |
| | DYYGSTYSAWFSYWGQGTLVTVSS (SEQ ID NO: 516) |
| 8A1V3-48 | EVQLVESGGGLVQPGGSLRLSCAASGYAFSNYWMSWVRQAPGKGLEWIGQI |
| | YPGDGDTKYNDSVKGRFTISRDNAKNSLYLQMNSLRAEDTAVYYCSREKGA |
| | DYYGSTYSAWFSYWGQGTLVTVSS (SEQ ID NO: 516) |
| 8A1V3-30 | QVQLVESGGGVVQPGRSLRLSCAASGYAFSNYWMSWVRQAPGKGLEWIGQ |
| | IYPGDGDTKYNDSVKGRFTISRDNSKNTLYLQMNSLRAEDTAVYYCSREKG |
| | ADYYGSTYSAWFSYWGQGTLVTVSS (SEQ ID NO: 517) |
| 8A1V4-59 | QVQLQESGPGLVKPSETLSLTCTVSGYAFSNYWMSWIRQPPGKGLEWIGQIY |
| | PGDGDTKYNPSLKSRVTISVDTSKNQFSLKLSSVTAADTAVYYCSREKGADY |
| | YGSTYSAWFSYWGQGTLVTVSS (SEQ ID NO: 518) |
| 8A1V3-15 | EVQLVESGGGLVKPGGSLRLSCAASGYAFSNYWMSWVRQAPGKGLEWIGQI |
| | YPGDGDTKYNAPVKGRFTISRDDSKNTLYLQMNSLKTEDTAVYYCSREKGA |
| | DYYGSTYSAWFSYWGQGTLVTVSS (SEQ ID NO: 519) |
| 8A1V4-30-4 | QVQLQESGPGLVKPSQTLSLTCTVSGYAFSNYWMSWIRQPPGKGLEWIGQIY |
| | PGDGDTKYNPSLKSRVTISVDTSKNQFSLKLSSVTAADTAVYYCSREKGADY |
| | YGSTYSAWFSYWGQGTLVTVSS (SEQ ID NO: 520) |
| Antibody 9F5 | Antibody 9F5 |
| 9F5V5-51 | EVQLVQSGAEVKKPGESLKISCKGSGYAFSSSWMNWVRQMPGKGLEWIGRI |
| | YPGDGDTNYNPSFQGQVTISADKSISTAYLQWSSLKASDTAMYYCARLLRN |
| | QPGESYAMDYWGQGTLVTVSS (SEQ ID NO: 522) |
| 9F5V1-46 | QVQLVQSGAEVKKPGASVKVSCKASGYAFSSSWMNWVRQAPGQGLEWIGR |
| | IYPGDGDTNYNQKFQGRVTMTRDTSTSTVYMELSSLRSEDTAVYYCARLLR |
| | NQPGESYAMDYWGQGTLVTVSS (SEQ ID NO: 523) |
| 9F5V1-69 | QVQLVQSGAEVKKPGSSVKVSCKASGYAFSSSWMNWVRQAPGQGLEWIGR |
| | IYPGDGDTNYNQKFQGRVTITADESTSTAYMELSSLRSEDTAVYYCARLLRN |
| | QPGESYAMDYWGQGTLVTVSS (SEQ ID NO: 524) |
| 9F5V3-23 | EVQLLESGGGLVQPGGSLRLSCAASGYAFSSSWMNWVRQAPGKGLEWIGRI |
| | YPGDGDTNYNDSVKGRFTISRDNSKNTLYLQMNSLRAEDTAVYYCARLLRN |
| | QPGESYAMDYWGQGTLVTVSS (SEQ ID NO: 525) |
| 9F5V3-7 | EVQLVESGGGLVQPGGSLRLSCAASGYAFSSSWMNWVRQAPGKGLEWIGRI |
| | YPGDGDTNYNDSVKGRFTISRDNAKNSLYLQMNSLRAEDTAVYYCARLLRN |
| | QPGESYAMDYWGQGTLVTVSS (SEQ ID NO: 526) |
| 9F5V3-48 | EVQLVESGGGLVQPGGSLRLSCAASGYAFSSSWMNWVRQAPGKGLEWIGRI |
| | YPGDGDTNYNDSVKGRFTISRDNAKNSLYLQMNSLRAEDTAVYYCARLLRN |
| | QPGESYAMDYWGQGTLVTVSS (SEQ ID NO: 526) |
| 9F5V3-30 | QVQLVESGGGVVQPGRSLRLSCAASGYAFSSSWMNWVRQAPGKGLEWIGRI |
| | YPGDGDTNYNDSVKGRFTISRDNSKNTLYLQMNSLRAEDTAVYYCARLLRN |
| | QPGESYAMDYWGQGTLVTVSS (SEQ ID NO: 527) |
| 9F5V4-59 | QVQLQESGPGLVKPSETLSLTCTVSGYAFSSSWMNWIRQPPGKGLEWIGRIY |
| | PGDGDTNYNPSLKSRVTISVDTSKNQFSLKLSSVTAADTAVYYCARLLRNQP |
| | GESYAMDYWGQGTLVTVSS (SEQ ID NO: 528) |
| 9F5V3-15 | EVQLVESGGGLVKPGGSLRLSCAASGYAFSSSWMNWVRQAPGKGLEWIGRI |
| | YPGDGDTNYNAPVKGRFTISRDDSKNTLYLQMNSLKTEDTAVYYCARLLRN |
| | QPGESYAMDYWGQGTLVTVSS (SEQ ID NO: 529) |
| 9F5V4-30-4 | QVQLQESGPGLVKPSQTLSLTCTVSGYAFSSSWMNWIRQPPGKGLEWIGRIY |
| | PGDGDTNYNPSLKSRVTISVDTSKNQFSLKLSSVTAADTAVYYCARLLRNQP |
| | GESYAMDYWGQGTLVTVSS (SEQ ID NO: 530) |
| 9F5-H1 | QVQLVQSGAEVKKPGASVKVSCKASGYAFSSSWMNWVRQAPGQGLEWMG |
| | RIYPGDGDTNYAQKFQGRVTMTRDTSTSTVYMELSSLRSEDTAVYYCARLL |
| | RNQPGESYAMDYWGQGTLVTVSS (SEQ ID NO: 845) |
| 9F5-H2 | QVQLVQSGAEVKKPGASVKVSCKASGYAFSSSWMNWVRQAPGQGLEWIGR |
| | IYPGDGDTNYAQKFQGRVTMTADTSTSTVYMELSSLRSEDTAVYYCARLLR |
| | NQPGESYAMDYWGQGTLVTVSS (SEQ ID NO: 846) |
| 9F5-H3 | QVQLVQSGAEVKKPGASLKISCKASGYAFSSSWMNWVRQAPGQGLEWIGRI |
| | YPGDGDTNYAQKFQGRATLTADTSTSTAYMELSSLRSEDTAVYYCARLLRN |
| | QPGESYAMDYWGQGALVTVSS (SEQ ID NO: 847) |
| Antibody 9G1 | Antibody 9G1 |
| 9G1V5-51 | EVQLVQSGAEVKKPGESLKISCKGSGYIFTTYWIHWVRQMPGKGLEWIGRID |
| | PNNGDTNYNPSFQGQVTISADKSISTAYLQWSSLKASDTAMYYCVMTGTDF |
| | DYWGQGTLVTVSS (SEQ ID NO: 532) |
| 9G1V1-46 | QVQLVQSGAEVKKPGASVKVSCKASGYIFTTYWIHWVRQAPGQGLEWIGRI |
| | DPNNGDTNYNQKFQGRVTMTRDTSTSTVYMELSSLRSEDTAVYYCVMTGT |
| | DFDYWGQGTLVTVSS (SEQ ID NO: 533) |
| 9G1V1-69 | QVQLVQSGAEVKKPGSSVKVSCKASGYIFTTYWIHWVRQAPGQGLEWIGRI |
| | DPNNGDTNYNQKFQGRVTITADESTSTAYMELSSLRSEDTAVYYCVMTGTD |
| | FDYWGQGTLVTVSS (SEQ ID NO: 534) |
| 9G1V3-23 | EVQLLESGGGLVQPGGSLRLSCAASGYIFTTYWIHWVRQAPGKGLEWIGRID |
| | PNNGDTNYNDSVKGRFTISRDNSKNTLYLQMNSLRAEDTAVYYCVMTGTDF |
| | DYWGQGTLVTVSS (SEQ ID NO: 535) |
| 9G1V3-30 | QVQLVESGGGVVQPGRSLRLSCAASGYIFTTYWIHWVRQAPGKGLEWIGRI |
| | DPNNGDTNYNDSVKGRFTISRDNSKNTLYLQMNSLRAEDTAVYYCVMTGT |
| | DFDYWGQGTLVTVSS (SEQ ID NO: 536) |
| 9G1V3-7 | EVQLVESGGGLVQPGGSLRLSCAASGYIFTTYWIHWVRQAPGKGLEWIGRID |
| | PNNGDTNYNDSVKGRFTISRDNAKNSLYLQMNSLRAEDTAVYYCVMTGTD |
| | FDYWGQGTLVTVSS (SEQ ID NO: 537) |
| 9G1V3-48 | EVQLVESGGGLVQPGGSLRLSCAASGYIFTTYWIHWVRQAPGKGLEWIGRID |
| | PNNGDTNYNDSVKGRFTISRDNAKNSLYLQMNSLRAEDTAVYYCVMTGTD |
| | FDYWGQGTLVTVSS (SEQ ID NO: 537) |
| 9G1V4-59 | QVQLQESGPGLVKPSETLSLTCTVSGYIFTTYWIHWIRQPPGKGLEWIGRIDP |
| | NNGDTNYNPSLKSRVTISVDTSKNQFSLKLSSVTAADTAVYYCVMTGTDFD |
| | YWGQGTLVTVSS (SEQ ID NO: 538) |
| 9G1V3-15 | EVQLVESGGGLVKPGGSLRLSCAASGYIFTTYWIHWVRQAPGKGLEWIGRID |
| | PNNGDTNYNAPVKGRFTISRDD SKNTLYLQMNSLKTEDTAVYYCVMTGTDF |
| | DYWGQGTLVTVSS (SEQ ID NO: 539) |
| 9G1V4-30-4 | QVQLQESGPGLVKPSQTLSLTCTVSGYIFTTYWIHWIRQPPGKGLEWIGRIDP |
| | NNGDTNYNPSLKSRVTISVDTSKNQFSLKLSSVTAADTAVYYCVMTGTDFD |
| | YWGQGTLVTVSS (SEQ ID NO: 540) |
| Antibody 9G3 | Antibody 9G3 |
| 9G3V3-15 | EVQLVESGGGLVKPGGSLRLSCAASGFNFNTYAMKWVRQAPGKGLEWIARI |
| | RSNSNDYATNYSAPVKGRFTISRDDSKNTLYLQMNSLKTEDTAVYYCVGHKI |
| | NNYPFAHWGQGTLVTVSS (SEQ ID NO: 636) |
| 9G3V3-23 | EVQLLESGGGLVQPGGSLRLSCAASGFNFNTYAMKWVRQAPGKGLEWIARI |
| | RSNSNDYATNYSDSVKGRFTISRDNSKNTLYLQMNSLRAEDTAVYYCVGHKI |
| | NNYPFAHWGQGTLVTVSS (SEQ ID NO: 637) |
| 9G3V3-30 | QVQLVESGGGVVQPGRSLRLSCAASGFNFNTYAMKWVRQAPGKGLEWIARI |
| | RSNSNDYATNYSDSVKGRFTISRDNSKNTLYLQMNSLRAEDTAVYYCVGHKI |
| | NNYPFAHWGQGTLVTVSS (SEQ ID NO: 638) |
| 9G3V3-48 | EVQLVESGGGLVQPGGSLRLSCAASGFNFNTYAMKWVRQAPGKGLEWIARI |
| | RSNSNDYATNYSDSVKGRFTISRDNAKNSLYLQMNSLRAEDTAVYYCVGHK |
| | INNYPFAHWGQGTLVTVSS (SEQ ID NO: 639) |
| 9G3V3-7 | EVQLVESGGGLVQPGGSLRLSCAASGFNFNTYAMKWVRQAPGKGLEWIARI |
| | RSNSNDYATNYSDSVKGRFTISRDNAKNSLYLQMNSLRAEDTAVYYCVGHK |
| | INNYPFAHWGQGTLVTVSS (SEQ ID NO: 640) |
| 9G3V1-69 | QVQLVQSGAEVKKPGSSVKVSCKASGFNFNTYAMKWVRQAPGQGLEWIAR |
| | IRSNSNDYATNYSQKFQGRVTITADESTSTAYMELSSLRSEDTAVYYCVGHKI |
| | NNYPFAHWGQGTLVTVSS (SEQ ID NO: 641) |
| 9G3V1-46 | QVQLVQSGAEVKKPGASVKVSCKASGFNFNTYAMKWVRQAPGQGLEWIAR |
| | IRSNSNDYATNYSQKFQGRVTMTRDTSTSTVYMELSSLRSEDTAVYYCVGH |
| | KINNYPFAHWGQGTLVTVSS (SEQ ID NO: 642) |
| 9G3V5-51 | EVQLVQSGAEVKKPGESLKISCKGSGFNFNTYAMKWVRQMPGKGLEWIARI |
| | RSNSNDYATNYSPSFQGQVTISADKSISTAYLQWSSLKASDTAMYYCVGHKI |
| | NNYPFAHWGQGTLVTVSS (SEQ ID NO: 643) |
| 9G3V4-59 | QVQLQESGPGLVKPSETLSLTCTVSGFNFNTYAMKWIRQPPGKGLEWIARIR |
| | SNSNDYATNYSPSLKSRVTISVDTSKNQFSLKLSSVTAADTAVYYCVGHKINN |
| | YPFAHWGQGTLVTVSS (SEQ ID NO: 644) |
| 9G3V4-30-4 | QVQLQESGPGLVKPSQTLSLTCTVSGFNFNTYAMKWIRQPPGKGLEWIARIR |
| | SNSNDYATNYSPSLKSRVTISVDTSKNQFSLKLSSVTAADTAVYYCVGHKINN |
| | YPFAHWGQGTLVTVSS (SEQ ID NO: 645) |
| Antibody 10A9 | Antibody 10A9 |
| 10A9V5-51 | EVQLVQSGAEVKKPGESLKISCKGSGYPFSNFWITWVRQMPGKGLEWIGDIY |
| | PGSDNRNFNPSFQGQVTISADKSISTAYLQWSSLKASDTAMYYCAREAYYTN |
| | PGFAYWGQGTLVTVSS (SEQ ID NO: 542) |
| 10A9V1-69 | QVQLVQSGAEVKKPGSSVKVSCKASGYPFSNFWITWVRQAPGQGLEWIGDI |
| | YPGSDNRNFNQKFQGRVTITADESTSTAYMELSSLRSEDTAVYYCAREAYYT |
| | NPGFAYWGQGTLVTVSS (SEQ ID NO: 543) |
| 10A9V1-46 | QVQLVQSGAEVKKPGASVKVSCKASGYPFSNFWITWVRQAPGQGLEWIGDI |
| | YPGSDNRNFNQKFQGRVTMTRDTSTSTVYMELSSLRSEDTAVYYCAREAYY |
| | TNPGFAYWGQGTLVTVSS (SEQ ID NO: 544) |
| 10A9V3-48 | EVQLVESGGGLVQPGGSLRLSCAASGYPFSNFWITWVRQAPGKGLEWIGDIY |
| | PGSDNRNFNDSVKGRFTISRDNAKNSLYLQMNSLRAEDTAVYYCAREAYYT |
| | NPGFAYWGQGTLVTVSS (SEQ ID NO: 545) |
| 10A9V3-7 | EVQLVESGGGLVQPGGSLRLSCAASGYPFSNFWITWVRQAPGKGLEWIGDIY |
| | PGSDNRNFNDSVKGRFTISRDNAKNSLYLQMNSLRAEDTAVYYCAREAYYT |
| | NPGFAYWGQGTLVTVSS (SEQ ID NO: 545) |
| 10A9V3-30 | QVQLVESGGGVVQPGRSLRLSCAASGYPFSNFWITWVRQAPGKGLEWIGDI |
| | YPGSDNRNFNDSVKGRFTISRDNSKNTLYLQMNSLRAEDTAVYYCAREAYY |
| | TNPGFAYWGQGTLVTVSS (SEQ ID NO: 546) |
| 10A9V3-23 | EVQLLESGGGLVQPGGSLRLSCAASGYPFSNFWITWVRQAPGKGLEWIGDIY |
| | PGSDNRNFNDSVKGRFTISRDNSKNTLYLQMNSLRAEDTAVYYCAREAYYT |
| | NPGFAYWGQGTLVTVSS (SEQ ID NO: 547) |
| 10A9V4-59 | QVQLQESGPGLVKPSETLSLTCTVSGYPFSNFWITWIRQPPGKGLEWIGDIYP |
| | GSDNRNFNPSLKSRVTISVDTSKNQFSLKLSSVTAADTAVYYCAREAYYTNP |
| | GFAYWGQGTLVTVSS (SEQ ID NO: 548) |
| 10A9V3-15 | EVQLVESGGGLVKPGGSLRLSCAASGYPFSNFWITWVRQAPGKGLEWIGDIY |
| | PGSDNRNFNAPVKGRFTISRDDSKNTLYLQMNSLKTEDTAVYYCAREAYYT |
| | NPGFAYWGQGTLVTVSS (SEQ ID NO: 549) |
| 10A9V4-39 | QLQLQESGPGLVKPSETLSLTCTVSGYPFSNFWITWIRQPPGKGLEWIGDIYP |
| | GSDNRNFNPSLKSRVTISVDTSKNQFSLKLSSVTAADTAVYYCAREAYYTNP |
| | GFAYWGQGTLVTVSS (SEQ ID NO: 550) |
| Antibody 11A8 | Antibody 11A8 |
| 11A8V3-15 | EVQLVESGGGLVKPGGSLRLSCAASGFNFNTYAMNWVRQAPGKGLEWVAR |
| | IRSKSNNYATYYAAPVKGRFTISRDDSKNTLYLQMNSLKTEDTAVYYCVRH |
| | YSNYGWGFAYWGQGTLVTVSS (SEQ ID NO: 552) |
| 11A8V3-48 | EVQLVESGGGLVQPGGSLRLSCAASGFNFNTYAMNWVRQAPGKGLEWVAR |
| | IRSKSNNYATYYADSVKGRFTISRDNAKNSLYLQMNSLRAEDTAVYYCVRH |
| | YSNYGWGFAYWGQGTLVTVSS (SEQ ID NO: 553) |
| 11A8V3-23 | EVQLLESGGGLVQPGGSLRLSCAASGFNFNTYAMNWVRQAPGKGLEWVARI |
| | RSKSNNYATYYADSVKGRFTISRDNSKNTLYLQMNSLRAEDTAVYYCVRHY |
| | SNYGWGFAYWGQGTLVTVSS (SEQ ID NO: 554) |
| 11A8V3-30 | QVQLVESGGGVVQPGRSLRLSCAASGFNFNTYAMNWVRQAPGKGLEWVAR |
| | IRSKSNNYATYYADSVKGRFTISRDNSKNTLYLQMNSLRAEDTAVYYCVRH |
| | YSNYGWGFAYWGQGTLVTVSS (SEQ ID NO: 555) |
| 11A8V3-7 | EVQLVESGGGLVQPGGSLRLSCAASGFNFNTYAMNWVRQAPGKGLEWVAR |
| | IRSKSNNYATYYADSVKGRFTISRDNAKNSLYLQMNSLRAEDTAVYYCVRH |
| | YSNYGWGFAYWGQGTLVTVSS (SEQ ID NO: 553) |
| 11A8V1-69 | QVQLVQSGAEVKKPGSSVKVSCKASGFNFNTYAMNWVRQAPGQGLEWVAR |
| | IRSKSNNYATYYAQKFQGRVTITADESTSTAYMELSSLRSEDTAVYYCVRHY |
| | SNYGWGFAYWGQGTLVTVSS (SEQ ID NO: 556) |
| 11A8V1-46 | QVQLVQSGAEVKKPGASVKVSCKASGFNFNTYAMNWVRQAPGQGLEWVA |
| | RIRSKSNNYATYYAQKFQGRVTMTRDTSTSTVYMELSSLRSEDTAVYYCVR |
| | HYSNYGWGFAYWGQGTLVTVSS (SEQ ID NO: 557) |
| 11A8V5-51 | EVQLVQSGAEVKKPGESLKISCKGSGFNFNTYAMNWVRQMPGKGLEWVARI |
| | RSKSNNYATYYAPSFQGQVTISADKSISTAYLQWSSLKASDTAMYYCVRHYS |
| | NYGWGFAYWGQGTLVTVSS (SEQ ID NO: 558) |
| 11A8V4-59 | QVQLQESGPGLVKPSETLSLTCTVSGFNFNTYAMNWIRQPPGKGLEWVARIR |
| | SKSNNYATYYAPSLKSRVTISVDTSKNQFSLKLSSVTAADTAVYYCVRHYSN |
| | YGWGFAYWGQGTLVTVSS (SEQ ID NO: 559) |
| 11A8V4-39 | QLQLQESGPGLVKPSETLSLTCTVSGFNFNTYAMNWIRQPPGKGLEWVARIR |
| | SKSNNYATYYAPSLKSRVTISVDTSKNQFSLKLSSVTAADTAVYYCVRHYSN |
| | YGWGFAYWGQGTLVTVSS (SEQ ID NO: 560) |
| Antibody 12D9 | Antibody 12D9 |
| 12D9V1-46 | QVQLVQSGAEVKKPGASVKVSCKASGYTFSDYYIHWVRQAPGQGLEWIGYI |
| | YPNNGDNGYNQKFQGRVTMTRDTSTSTVYMELSSLRSEDTAVYYCARRGY |
| | YGGSYDYWGQGTLVTVSS (SEQ ID NO: 562) |
| 12D9V5-51 | EVQLVQSGAEVKKPGESLKISCKGSGYTFSDYYIHWVRQMPGKGLEWIGYIY |
| | PNNGDNGYNPSFQGQVTISADKSISTAYLQWSSLKASDTAMYYCARRGYYG |
| | GSYDYWGQGTLVTVSS (SEQ ID NO: 563) |
| 12D9V1-69 | QVQLVQSGAEVKKPGSSVKVSCKASGYTFSDYYIHWVRQAPGQGLEWIGYI |
| | YPNNGDNGYNQKFQGRVTITADESTSTAYMELSSLRSEDTAVYYCARRGYY |
| | GGSYDYWGQGTLVTVSS (SEQ ID NO: 564) |
| 12D9V3-48 | EVQLVESGGGLVQPGGSLRLSCAASGYTFSDYYIHWVRQAPGKGLEWIGYIY |
| | PNNGDNGYNDSVKGRFTISRDNAKNSLYLQMNSLRAEDTAVYYCARRGYY |
| | GGSYDYWGQGTLVTVSS (SEQ ID NO: 565) |
| 12D9V3-30 | QVQLVESGGGVVQPGRSLRLSCAASGYTFSDYYIHWVRQAPGKGLEWIGYI |
| | YPNNGDNGYNDSVKGRFTISRDNSKNTLYLQMNSLRAEDTAVYYCARRGY |
| | YGGSYDYWGQGTLVTVSS (SEQ ID NO: 566) |
| 12D9V3-23 | EVQLLESGGGLVQPGGSLRLSCAASGYTFSDYYIHWVRQAPGKGLEWIGYIY |
| | PNNGDNGYNDSVKGRFTISRDNSKNTLYLQMNSLRAEDTAVYYCARRGYY |
| | GGSYDYWGQGTLVTVSS (SEQ ID NO: 567) |
| 12D9V3-7 | EVQLVESGGGLVQPGGSLRLSCAASGYTFSDYYIHWVRQAPGKGLEWIGYIY |
| | PNNGDNGYNDSVKGRFTISRDNAKNSLYLQMNSLRAEDTAVYYCARRGYY |
| | GGSYDYWGQGTLVTVSS (SEQ ID NO: 565) |
| 12D9V4-59 | QVQLQESGPGLVKPSETLSLTCTVSGYTFSDYYIHWIRQPPGKGLEWIGYIYP |
| | NNGDNGYNPSLKSRVTISVDTSKNQFSLKLSSVTAADTAVYYCARRGYYGG |
| | SYDYWGQGTLVTVSS (SEQ ID NO: 568) |
| 12D9V3-15 | EVQLVESGGGLVKPGGSLRLSCAASGYTFSDYYIHWVRQAPGKGLEWIGYIY |
| | PNNGDNGYNAPVKGRFTISRDDSKNTLYLQMNSLKTEDTAVYYCARRGYY |
| | GGSYDYWGQGTLVTVSS (SEQ ID NO: 569) |
| 12D9V4-30-4 | QVQLQESGPGLVKPSQTLSLTCTVSGYTFSDYYIHWIRQPPGKGLEWIGYIYP |
| | NNGDNGYNPSLKSRVTISVDTSKNQFSLKLSSVTAADTAVYYCARRGYYGG |
| | SYDYWGQGTLVTVSS (SEQ ID NO: 570) |
| Antibody 12F9 | Antibody 12F9 |
| 12F9V3-15 | EVQLVESGGGLVKPGGSLRLSCAASGFRFNTYAMTWVRQAPGKGLEWEGVI |
| | RRKSSNFATLYAAPVKGRFTISRDDSKNTLYLQMNSLKTEDTAVYYCVRHK |
| | SNKYPFVYWGQGTLVTVSS (SEQ ID NO: 572) |
| 12F9V3-23 | EVQLLESGGGLVQPGGSLRLSCAASGFRFNTYAMTWVRQAPGKGLEWEGVI |
| | RRKSSNFATLYADSVKGRFTISRDNSKNTLYLQMNSLRAEDTAVYYCVRHK |
| | SNKYPFVYWGQGTLVTVSS (SEQ ID NO: 573) |
| 12F9V3-48 | EVQLVESGGGLVQPGGSLRLSCAASGFRFNTYAMTWVRQAPGKGLEWEGVI |
| | RRKSSNFATLYADSVKGRFTISRDNAKNSLYLQMNSLRAEDTAVYYCVRHK |
| | SNKYPFVYWGQGTLVTVSS (SEQ ID NO: 574) |
| 12F9V3-30 | QVQLVESGGGVVQPGRSLRLSCAASGFRFNTYAMTWVRQAPGKGLEWEGV |
| | IRRKSSNFATLYADSVKGRFTISRDNSKNTLYLQMNSLRAEDTAVYYCVRHK |
| | SNKYPFVYWGQGTLVTVSS (SEQ ID NO: 575) |
| 12F9V3-7 | EVQLVESGGGLVQPGGSLRLSCAASGFRFNTYAMTWVRQAPGKGLEWEGVI |
| | RRKSSNFATLYADSVKGRFTISRDNAKNSLYLQMNSLRAEDTAVYYCVRHK |
| | SNKYPFVYWGQGTLVTVSS (SEQ ID NO: 574) |
| 12F9V1-69 | QVQLVQSGAEVKKPGSSVKVSCKASGFRFNTYAMTWVRQAPGQGLEWEGV |
| | IRRKSSNFATLYAQKFQGRVTITADESTSTAYMELSSLRSEDTAVYYCVRHK |
| | SNKYPFVYWGQGTLVTVSS (SEQ ID NO: 576) |
| 12F9V1-46 | QVQLVQSGAEVKKPGASVKVSCKASGFRFNTYAMTWVRQAPGQGLEWEG |
| | VIRRKSSNFATLYAQKFQGRVTMTRDTSTSTVYMELSSLRSEDTAVYYCVRH |
| | KSNKYPFVYWGQGTLVTVSS (SEQ ID NO: 577) |
| 12F9V5-51 | EVQLVQSGAEVKKPGESLKISCKGSGFRFNTYAMTWVRQMPGKGLEWEGVI |
| | RRKSSNFATLYAPSFQGQVTISADKSISTAYLQWSSLKASDTAMYYCVRHKS |
| | NKYPFVYWGQGTLVTVSS (SEQ ID NO: 578) |
| 12F9V4-59 | QVQLQESGPGLVKPSETLSLTCTVSGFRFNTYAMTWIRQPPGKGLEWEGVIR |
| | RKSSNFATLYAPSLKSRVTISVDTSKNQFSLKLSSVTAADTAVYYCVRHKSN |
| | KYPFVYWGQGTLVTVSS (SEQ ID NO: 579) |
| 12F9V4-39 | QLQLQESGPGLVKPSETLSLTCTVSGFRFNTYAMTWIRQPPGKGLEWEGVIR |
| | RKSSNFATLYAPSLKSRVTISVDTSKNQFSLKLSSVTAADTAVYYCVRHKSN |
| | KYPFVYWGQGTLVTVSS (SEQ ID NO: 580) |
| Antibody 10C1 | Antibody 10C1 |
| 10C1V3-15 | EVQLVESGGGLVKPGGSLRLSCAASGFTFSDAWMDWVRQAPGKGLEWVAE |
| | IRNKINNHATYYAAPVKGRFTISRDDSKNTLYLQMNSLKTEDTAVYYCTSLY |
| | DGSYLRFAYWGQGTLVTVSS (SEQ ID NO: 647) |
| 10C1V3-7 | EVQLVESGGGLVQPGGSLRLSCAASGFTFSDAWMDWVRQAPGKGLEWVAE |
| | IRNKINNHATYYADSVKGRFTISRDNAKNSLYLQMNSLRAEDTAVYYCTSLY |
| | DGSYLRFAYWGQGTLVTVSS (SEQ ID NO: 648) |
| 10C1V3-23 | EVQLLESGGGLVQPGGSLRLSCAASGFTFSDAWMDWVRQAPGKGLEWVAEI |
| | RNKINNHATYYADSVKGRFTISRDNSKNTLYLQMNSLRAEDTAVYYCTSLY |
| | DGSYLRFAYWGQGTLVTVSS (SEQ ID NO: 649) |
| 10C1V3-30 | QVQLVESGGGVVQPGRSLRLSCAASGFTFSDAWMDWVRQAPGKGLEWVAE |
| | IRNKINNHATYYADSVKGRFTISRDNSKNTLYLQMNSLRAEDTAVYYCTSLY |
| | DGSYLRFAYWGQGTLVTVSS (SEQ ID NO: 650) |
| 10C1V3-48 | EVQLVESGGGLVQPGGSLRLSCAASGFTFSDAWMDWVRQAPGKGLEWVAE |
| | IRNKINNHATYYADSVKGRFTISRDNAKNSLYLQMNSLRAEDTAVYYCTSLY |
| | DGSYLRFAYWGQGTLVTVSS (SEQ ID NO: 651) |
| 10C1V1-69 | QVQLVQSGAEVKKPGSSVKVSCKASGFTFSDAWMDWVRQAPGQGLEWVA |
| | EIRNKINNHATYYAQKFQGRVTITADESTSTAYMELSSLRSEDTAVYYCTSL |
| | YDGSYLRFAYWGQGTLVTVSS (SEQ ID NO: 652) |
| 10C1V1-46 | QVQLVQSGAEVKKPGASVKVSCKASGFTFSDAWMDWVRQAPGQGLEWVA |
| | EIRNKINNHATYYAQKFQGRVTMTRDTSTSTVYMELSSLRSEDTAVYYCTSL |
| | YDGSYLRFAYWGQGTLVTVSS (SEQ ID NO: 653) |
| 10C1V5-51 | EVQLVQSGAEVKKPGESLKISCKGSGFTFSDAWMDWVRQMPGKGLEWVAE |
| | IRNKINNHATYYAPSFQGQVTISADKSISTAYLQWSSLKASDTAMYYCTSLY |
| | DGSYLRFAYWGQGTLVTVSS (SEQ ID NO: 654) |
| 10C1V4-59 | QVQLQESGPGLVKPSETLSLTCTVSGFTFSDAWMDWIRQPPGKGLEWVAEIR |
| | NKINNHATYYAPSLKSRVTISVDTSKNQFSLKLSSVTAADTAVYYCTSLYDGS |
| | YLRFAYWGQGTLVTVSS (SEQ ID NO: 655) |
| 10C1V4-30-4 | QVQLQESGPGLVKPSQTLSLTCTVSGFTFSDAWMDWIRQPPGKGLEWVAEIR |
| | NKINNHATYYAPSLKSRVTISVDTSKNQFSLKLSSVTAADTAVYYCTSLYDG |
| | SYLRFAYWGQGTLVTVSS (SEQ ID NO: 656) |
| Antibody 7E9 | Antibody 7E9 |
| 7E9V1-46 | QVQLVQSGAEVKKPGASVKVSCKASGYTFTEYTMHWVRQAPGQGLEWIGG |
| | INPNNGGTSYKQKFQGRVTMTRDTSTSTVYMELSSLRSEDTAVYYCARGGS |
| | HYYAMDYWGQGTLVTVSS (SEQ ID NO: 658) |
| 7E9V1-69 | QVQLVQSGAEVKKPGSSVKVSCKASGYTFTEYTMHWVRQAPGQGLEWIGG |
| | INPNNGGTSYKQKFQGRVTITADESTSTAYMELSSLRSEDTAVYYCARGGSH |
| | YYAMDYWGQGTLVTVSS (SEQ ID NO: 659) |
| 7E9V5-51 | EVQLVQSGAEVKKPGESLKISCKGSGYTFTEYTMHWVRQMPGKGLEWIGGI |
| | NPNNGGTSYKPSFQGQVTISADKSISTAYLQWSSLKASDTAMYYCARGGSH |
| | YYAMDYWGQGTLVTVSS (SEQ ID NO: 660) |
| 7E9V3-23 | EVQLLESGGGLVQPGGSLRLSCAASGYTFTEYTMHWVRQAPGKGLEWIGGI |
| | NPNNGGTSYKDSVKGRFTISRDNSKNTLYLQMNSLRAEDTAVYYCARGGSH |
| | YYAMDYWGQGTLVTVSS (SEQ ID NO: 661) |
| 7E9V3-30 | QVQLVESGGGVVQPGRSLRLSCAASGYTFTEYTMHWVRQAPGKGLEWIGGI |
| | NPNNGGTSYKDSVKGRFTISRDNSKNTLYLQMNSLRAEDTAVYYCARGGSH |
| | YYAMDYWGQGTLVTVSS (SEQ ID NO: 662) |
| 7E9V3-48 | EVQLVESGGGLVQPGGSLRLSCAASGYTFTEYTMHWVRQAPGKGLEWIGGI |
| | NPNNGGTSYKDSVKGRFTISRDNAKNSLYLQMNSLRAEDTAVYYCARGGSH |
| | YYAMDYWGQGTLVTVSS (SEQ ID NO: 663) |
| 7E9V3-7 | EVQLVESGGGLVQPGGSLRLSCAASGYTFTEYTMHWVRQAPGKGLEWIGGI |
| | NPNNGGTSYKDSVKGRFTISRDNAKNSLYLQMNSLRAEDTAVYYCARGGSH |
| | YYAMDYWGQGTLVTVSS (SEQ ID NO: 664) |
| 7E9V4-59 | QVQLQESGPGLVKPSETLSLTCTVSGYTFTEYTMHWIRQPPGKGLEWIGGIN |
| | PNNGGTSYKPSLKSRVTISVDTSKNQFSLKLSSVTAADTAVYYCARGGSHYY |
| | AMDYWGQGTLVTVSS (SEQ ID NO: 665) |
| 7E9V3-15 | EVQLVESGGGLVKPGGSLRLSCAASGYTFTEYTMHWVRQAPGKGLEWIGGI |
| | NPNNGGTSYKAPVKGRFTISRDDSKNTLYLQMNSLKFEDTAVYYCARGGSH |
| | YYAMDYWGQGTLVTVSS (SEQ ID NO: 666) |
| 7E9V4-39 | QLQLQESGPGLVKPSETLSLTCTVSGYTFTEYTMHWIRQPPGKGLEWIGGIN |
| | PNNGGTSYKPSLKSRVTISVDTSKNQFSLKLSSVTAADTAVYYCARGGSHYY |
| | AMDYWGQGTLVTVSS (SEQ ID NO: 667) |
| Antibody 8C3 | Antibody 8C3 |
| 8C3V1-46 | QVQLVQSGAEVKKPGASVKVSCKASGYSFTGYYMHWVRQAPGQGLEWIGR |
| | VNPNNGGTSYNQKFQGRVTMTRDTSTSTVYMELSSLRSEDTAVYYC |
| | VLTGGYFDYWGQGTLVTVSS (SEQ ID NO: 669) |
| 8C3V5-51 | EVQLVQSGAEVKKPGESLKISCKGSGYSFTGYYMHWVRQMPGKGLEWIGR |
| | VNPNNGGTSYNPSFQGQVTISADKSISTAYLQWSSLKASDTAMYYCVLTGG |
| | YFDYWGQGTLVTVSS (SEQ ID NO: 670) |
| 8C3V3-23 | EVQLLESGGGLVQPGGSLRLSCAASGYSFTGYYMHWVRQAPGKGLEWIGR |
| | VNPNNGGTSYNDSVKGRFTISRDNSKNTLYLQMNSLRAEDTAVYYCVLTGG |
| | YFDYWGQGTLVTVSS (SEQ ID NO: 671) |
| 8C3V1-69 | QVQLVQSGAEVKKPGSSVKVSCKASGYSFTGYYMHWVRQAPGQGLEWIGR |
| | VNPNNGGTSYNQKFQGRVTITADESTSTAYMELSSLRSEDTAVYYCVLTGG |
| | YFDYWGQGTLVTVSS (SEQ ID NO: 672) |
| 8C3V3-30 | QVQLVESGGGVVQPGRSLRLSCAASGYSFTGYYMHWVRQAPGKGLEWIGR |
| | VNPNNGGTSYNDSVKGRFTISRDNSKNTLYLQMNSLRAEDTAVYYCVLTGG |
| | YFDYWGQGTLVTVSS (SEQ ID NO: 673) |
| 8C3V3-48 | EVQLVESGGGLVQPGGSLRLSCAASGYSFTGYYMHWVRQAPGKGLEWIGR |
| | VNPNNGGTSYNDSVKGRFTISRDNAKNSLYLQMNSLRAEDTAVYYCVLTGG |
| | YFDYWGQGTLVTVSS (SEQ ID NO: 674) |
| 8C3V3-7 | EVQLVESGGGLVQPGGSLRLSCAASGYSFTGYYMHWVRQAPGKGLEWIGR |
| | VNPNNGGTSYNDSVKGRFTISRDNAKNSLYLQMNSLRAEDTAVYYCVLTGG |
| | YFDYWGQGTLVTVSS (SEQ ID NO: 675) |
| 8C3V4-59 | QVQLQESGPGLVKPSETLSLTCTVSGYSFTGYYMHWIRQPPGKGLEWIGRVN |
| | PNNGGTSYNPSLKSRVTISVDTSKNQFSLKLSSVTAADTAVYYCVLTGGYFD |
| | YWGQGTLVTVSS (SEQ ID NO: 676) |
| 8C3V3-15 | EVQLVESGGGLVKPGGSLRLSCAASGYSFTGYYMHWVRQAPGKGLEWIGR |
| | VNPNNGGTSYNAPVKGRFTISRDDSKNTLYLQMNSLKTEDTAVYYCVLTGG |
| | YFDYWGQGTLVTVSS (SEQ ID NO: 677) |
| 8C3V4-39 | QLQLQESGPGLVKPSETLSLTCTVSGYSFTGYYMHWIRQPPGKGLEWIGRVN |
| | PNNGGTSYNPSLKSRVTISVDTSKNQFSLKLSSVTAADTAVYYCVLTGGYFD |
| | YWGQGTLVTVSS (SEQ ID NO: 678) |

[0561] Humanization of Antibody 9F5

[0562] The heavy chain variable region (VH) and light chain variable region (VL) sequences of murine anti-TREM2 antibody 9F5 (T2-9F5.1) were used as input to the IgBLAST program on the NCBI website (Ye, J. et al. Nucleic Acids Research 41:W34-W40 (2013)). IgBLAST takes a murine VH or VL sequence and compares it to a library of known human germline sequences. The databases used were IMGT human VH genes (F+ORF, 273 germline sequences) and IMGT human VLkappa genes (F+ORF, 74 germline sequences). For the 2F5 antibody VL, human germline IGKV2-29 (allele 2) was chosen as a good acceptor sequence and human light chain IGKJ2(allele 1) joining region (J gene) was chosen from human joining region sequences compiled at IMGT® the international ImMunoGeneTics information System® (FIG. 4C). For the 2F5 antibody VH, human germline IGHV1-46(allele 1) was chosen as a good acceptor sequence and the human heavy chain IGHJ4(allele 1) joining region (J gene) was chosen from human joining region sequences compiled at IMGT® the international ImMunoGeneTics information System® (FIG. 4D). Complementarity determing regions (CDRs) for the antibody VL and VH were defined according to the AbM definition (AbM antibody modeling software).

[0563] Alteration of human germline framework (i.e., non-CDR residues in the VH and VL) positions to corresponding parental murine sequences may be required to optimize binding of the humanized antibody. Potential changes for each humanized sequence are noted in FIGS. 4C and 4D.

[0564] FIGS. 4C and 4D show sequences of humanized versions of anti-TREM2 antibody 9F5. In the in CDR-L1 of theVL domain of antibody 9F5, Asp30c-Gly30d has a high potential for deamidation followed by isoaspartate formation (FIG. 4C).

[0565] Post-translational modification at this site may affect binding of the antibody to its target. The 9F5 may be humanized and then in a final step the NG may be altered, for example, to QG, and tested to determine if binding is maintained (FIG. 4C). In CDR-L2, Asn53 has a low potential for deamidation based on sequence and conformation but may show a low level of deamidation and may be changed to reduce deamidation risk (FIG. 4C). Variant VL sequences based on the above are listed in Table 7A.

[0566] In the VH domain of antibody 9F5, there are two Asn (Asn58 and Asn 98) that have low potential for deamidation based on sequence and conformation, and may show a low level of these post-translational modifications (FIG. 4D). In additioan, Asn58 and Asn 98 may be changed to reduce deamidation risk (FIG. 4D). In CDR-H1, Trp33 is likely to be solvent-exposed and have potential for oxidation, especially under stress conditions (FIG. 4D). Accordingly, Trp33 may be changed to reduce oxidation risk. In CDR-H2, Asp54-Gly55 has a medium potential for isoaspartate formation (FIG. 4D). Thus, post-translational modification at Asp54-Gly55 may affect binding of the antibody to its target. The 9F5 may be humanized and then in a final step the DG, may be altered, for example, toEG or other amino acids, and tested to determine if binding is maintained. Variant VH sequences based on the above are listed in Table 7B.

### Example 2: Epitope Mapping of TREM2 Antibodies

[0567] TREM2 antibodies were tested for their ability to bind 15-mer or 25-mer peptides spanning the entire human TREM2 (SEQ ID NO: 1) and mouse TREM2 (SEQ ID NO: 2). Additionally, the epitopes of the anti-TREM2 antibodies 9F5 (MAb), T21-9 (Fab), T22 (Fab), and T45-10 (Fab) were mapped by shotgun mutatagenesis.

[0568] Methodology

[0569] Linear 15-mer peptides were synthesized based on the sequence of human TREM2 (SEQ ID NO: 1), with a 14 residue overlap. In addition, linear 25-mer peptides were synthesized based on sequence of human TREM2 (SEQ ID NO: 1) or mouse TREM2 (SEQ ID NO: 2) with a single residue shift. The binding of TREM2 antibodies to each of the synthesized peptides was tested in an ELISA based method. In this assay, the peptide arrays were incubated with primary antibody solution (overnight at 4° C.). After washing, the peptide arrays were incubated with a 1/1000 dilution of an antibody peroxidase conjugate (SBA, cat. nr. 2010-05) for one hour at 25° C. After washing, the peroxidase substrate 2,2′-azino-di-3-ethylbenzthiazoline sulfonate (ABTS) and 2 μl/ml of 3% H₂O₂ were added. After one hour, the color development was measured. The color development was quantified with a charge coupled device (CCD) camera and an image processing system.

[0570] Alternatively, to reconstruct epitopes of the target molecule, libraries of looped and combinatorial peptides were synthesized. An amino functionalized polypropylene support was obtained by grafting with a proprietary hydrophilic polymer formulation, followed by reaction with t-butyloxycarbonyl-hexamethylenediamine (BocHMDA) using dicyclohexylcarbodiimide (DCC) with N-hydroxybenzotriazole (HOBt) and subsequent cleavage of the Boc-groups using trifluoroacetic acid (TFA). Standard Fmoc-peptide synthesis was used to synthesize peptides on the amino-functionalized solid support by custom modified JANUS liquid handling stations (Perkin Elmer).

[0571] Synthesis of structural mimics was done using Pepscan's proprietary Chemically Linked Peptides on Scaffolds (CLIPS) technology. CLIPS technology allows to structure peptides into single loops and double-loops. CLIPS templates are coupled to cysteine residues. The side-chains of multiple cysteines in the peptides are coupled to one or two CLIPS templates. For example, a 0.5 mM solution of the mP2 CLIPS (2,6-bis(bromomethyl)pyridine) is dissolved in ammonium bicarbonate (20 mM, pH 7.8)/acetonitrile (1:3(v/v)). This solution is added onto the peptide arrays. The CLIPS template will bind to side-chains of two cysteines as present in the solid-phase bound peptides of the peptide-arrays (455 wells plate with 3 μl wells). The peptide arrays are gently shaken in the solution for 30 to 60 minutes while completely covered in solution. Finally, the peptide arrays are washed extensively with excess of H₂O and sonicated in disrupt-buffer containing 1% SDS/0.1% β-mercaptoethanol in PBS (pH 7.2) at 70° C. for 30 minutes, followed by sonication in H₂O for another 45 minutes. The T3 CLIPS (2,4,6-tris(bromomethyl)pyridine) carrying peptides were made in a similar way but now with three cysteines.

[0572] Looped Peptides:

[0573] constrained peptides of length 17. Positions 2-16 are 15-mers derived from the target sequence. Native Cys residues are protected by acetamidomethyl group (ACM). Positions 1 and 17 are Cys that are linked by mP2 CLIPS moieties. Combinatorial peptides (discontinuous mimics): constrained peptides of length 33. Positions 2-16 and 18-32 are 15-mer peptides derived from the target sequence with native Cys residues protected by ACM. Positions 1, 17 and 33 are Cys that are linked by T3 CLIPS moieties.

[0574] The binding of antibody to each of the synthesized peptides is tested in a PEPSCAN-based ELISA. The peptide arrays are incubated with test antibody solution composed of the experimentally optimized concentration of the test antibody and blocking solution (for example 4% horse serum, 5% ovalbumin (w/v) in PBS/1% Tween80). The peptide arrays are incubated with the test antibody solution overnight at 4° C. After extensive washing with washing buffer (1×PBS, 0.05% Tween80), the peptide arrays are incubated with a 1/1000 dilution of an appropriate antibody peroxidase conjugate for one hour at 25° C. After washing with the washing buffer, the peroxidase substrate 2,2′-azino-di-3-ethylbenzthiazoline sulfonate (ABTS) and 2 μl/ml of 3% H₂O₂ are added. After one hour, the color development is measured. The color development is quantified with a charge coupled device (CCD)—camera and an image processing system.

[0575] Alternatively a mass spectrometry method is used to identify conformational epitopes. In order to determine the key residues of conformational epitopes on the TREM2 protein that anti-TREM2 antibodies bind to with high resolution, antibody/antigen complexes are incubated with deuterated cross-linkers and subjected to multi-enzymatic proteolytic cleavage. After enrichment of the cross-linked peptides, the samples are analyzed by high resolution mass spectrometry (nLC-Orbitrap MS) and the data generated is analyzed using XQuest software. Specifically, TREM2 ECD/antibody complexes are generated by mixing equimolar solutions of TREM2 antigen and antibody (4 μM in 5 μl each). One μ1 of the mixture obtained is mixed with 1 μl of a matrix composed of a re-crystallized sinapinic acid matrix (10 mg/ml) in acetonitrile/water (1:1, v/v), TFA 0.1% (K200 MALDI Kit). After mixing, 1 μl of each sample is spotted on a MALDI plate (SCOUT 384). After crystallization at room temperature, the plate is introduced in aMALDI mass spectrometer and analyzed immediately. The analysis is repeated in triplicate. Peaks representing monomeric antibody, the antigen, and antibody and antigen/antibody complexes are detected at the predicted molecular weights.

[0576] It is then determined whether the epitope in conformational binding competes with unstructured C1q peptides generated by proteolysis. Specifically, to determine if TREM2 ECD/antibody complexes can compete with linear peptides, the TREM2 ECD antigen is digested with immobilized pepsin. 25 μl of the antigen with a concentration of 10 μM are mixed with immobilized pepsin 5 μM and incubate at room temperature for 30 minutes. After the incubation time, the sample are centrifuged and the supernatant is pipetted. The completion of the proteolysis is controlled by High-Mass MALDI mass spectrometry in linear mode. The pepsin proteolysis is optimized in order to obtain a large amount of peptide in the 1000-3500 Da range. Next, 5 μl of the antigen peptides generated by proteolysis are mixed with 5 μl of antibodies (8 μM) and incubated at 37° C. for 6 hours. After incubation of the antibodies with the TREM2 antigen peptides, 5 μl of the mixture is mixed with 5 μl of the intact TREM2 antigen (4 μM) so the final mix contains 2 μM/2 μM/2.5 μM of TREM2/antibody/TREM2 antigen peptides. The MALDI ToF MS analysis is performed using CovalX's HM3 interaction module with a standard nitrogen laser and focusing on different mass ranges from 0 to 2000 kDa. For the analysis, the following parameters are applied for the mass spectrometer: Linear and Positive mode; Ion Source 1: 20 kV; Ion Source 2: 17 kV; Pulse Ion Extraction: 400 ns; for HM3: Gain Voltage: 3.14 kV; Gain Voltage: 3.14 kV; Acceleration Voltage: 20 kV. To calibrate the instrument, an external calibration with clusters of Insulin, BSA and IgG is being applied. For each sample, 3 spots are analyzed (300 laser shots per spots). Presented spectrum corresponds to the sum of 300 laser shots. The MS data are analyzed using the Complex Tracker analysis software version 2.0 (CovalX Inc). To identify the conformational epitopes for TREM2 binding to antibodies, using chemical cross-linking, High-Mass MALDI mass spectrometry and nLCOrbitrap mass spectrometry the interaction interface between the antigen and antibodies the following procedure is followed. 5 μl of the sample antigen (concentration 4 μM) is mixed with 5 μl of the sample antibody (Concentration 4 μM) in order to obtain an antibody/antigen mix with final concentration 2 μM/2 μM. The mixture is incubated at 37° C. for 180 minutes. In a first step, 1 mg of DiSuccinimidylSuberate H12 (DSS-H12) cross-linker is mixed with 1 mg of DiSuccinimidylSuberate D12 (DSS-D12) cross-linker. The 2 mg prepared were mixed with 1 ml of DMF in order to obtain a 2 mg/ml solution of DSS H12/D12. 10 μl of the antibody/antigen mix prepared previously were mixed with 1 μl of the solution of cross-linker d0/d12 prepared (2 mg/ml). The solution is incubated 180 minutes at room temperature in order to achieve the cross-linking reaction.

[0577] In order to facilitate the proteolysis, it is necessary to reduce the disulfide bonds present in the protein. The cross-linked samples are mixed with 20 μl of ammonium bicarbonate (25 mM, pH 8.3). After mixing 2.5 μl of DTT (500 mM) is added to the solution. The mixture is then incubated 1 hour at 55° C. After incubation, 2.5 μl of iodioacetamide (1 M) is added before 1 hour of incubation at room temperature in a dark room. After incubation, the solution is diluted 1/5 by adding 120 μl of the buffer used for the proteolysis. 145 μl of the reduced/alkyled cross-linked sample is mixed with 2 μl of trypsin (Sigma, T6567). The proteolytic mixture is incubated overnight at 37° C. For a-chymotrypsin proteolysis, the buffer of proteolysis is Tris-HCL 100 mM, CaCl2 10 mM, pH7.8. The 145 μl of the reduced/alkyled cross-linked complex is mixed with 2 μl of α-chymotrypsin 200 μM and incubated overnight at 30° C. For this analysis, an nLC in combination with Orbitrap mass spectrometry is used. The cross-linker peptides are analyzed using Xquest version 2.0 and stavrox software. The peptides and cross-linked amino acids are then identified.

[0578] Results

[0579] The TREM2 binding region was determined for 26 anti-TREM2 antibodies. The binding regions within human and/or mouse TREM2 are listed in Tables 8A and 8B.

TABLE 8A
TREM2 antibody binding region to human TREM2

| Antibody | Human TREM2 binding region | Amino acid region of SEQ ID NO: 1 |
|---|---|---|
| 5A2 | ³⁵SCPYDSMKHWGRRKA⁴⁹ and | 35-49 and 140-150 |
| 7D1 | ¹⁴⁰DLWFPGESESF¹⁵⁰ | |
| 8E10 | ³⁹DSMKHWGRRKA⁴⁹ and | 39-49 and 63-77 |
| | ⁶³VVSTHNLWLLSFLRR⁷⁷ | |
| 2H8 | ⁵¹CRQLGEKGPCQ⁶¹ | 51-61 |
| 18E4 | ⁵⁵GEKGPCQR⁶²,¹⁰⁴DAGLYQ¹⁰⁹, | 55-62, 104-109, and 148-158 |
| | and ¹⁴⁸ESFEDAHVEHS¹⁵⁸ | |
| 44A8 | ⁵⁵GEKGPCQR⁶², ¹⁰⁴DAGLYQ¹⁰⁹, and | 55-62, 104-109, and 160-166 |
| | ¹⁶⁰SRSLLEG¹⁶⁶ | |
| 18D8 | ⁵⁵GEKGPCQRVVS⁶⁵ and | 55-65 and 124-134 |
| | ¹²⁴VLVEVLADPLD¹³⁴ | |
| 49E12 | ⁶³VVSTHNLWLLS⁷³ and | 63-73 and 156-170 |
| 11D7 | ¹⁵⁶EHSISRSLLEGEIPF¹⁷⁰ | |
| 6H6 | ¹¹⁷EADTLRKVLVEVLADPL¹³³ | 117-133 |
| 8C3 | ¹³⁷DAGDLWFPGE¹⁴⁶ | 137-146 |
| 7E9 | | |
| 12F9 | | |
| 9G1 | | |
| 9G3 | | |
| 11A8 | | |
| 7B3 | | |
| 3B10 | ¹³⁹GDLWFPGES¹⁴⁷ | 139-147 |
| 8F8 | | |
| 11H5 | ¹³⁹GDLWFPGESES¹⁴⁹ | 139-149 |
| 6G12 | | |
| 10A9 | | |
| 10C1 | | |
| 3A2 | | |
| 2F6 | | |
| 1B4 | ¹⁴⁰DLWFPGE¹⁴⁶ | 140-146 |
| 29F6 | | |
| 7B11 | | |
| 40D5 | | |
| 45D6 | | |
| 29F7 | | |
| 21D10 | | |
| 3A7 | ¹⁴²WFPGESESFED¹⁵² | 142-152 |
| 7E5 | | |
| 6H2 | ¹⁴⁶ESESFEDAH¹⁵⁴ | 146-154 |
| 12G6 | ¹⁴⁹SFEDAHVEH¹⁵⁷ | 149-157 |
| 9F5 | | |
| 2A7 | ¹⁵⁴HVEHSISR¹⁶¹ | 154-161 |
| 9B4 | | |

TABLE 8
TREM2 antibody binding region to mouse TREM2

| Anti- | MouseTREM2 | Amino acid region of |
|---|---|---|
| body | binding region | SEQ ID NO: 2 |
| 2H8 | ⁵¹CRQLGEEGPCQ⁶¹ | 51-61 |
| 3B10 | | |
| 8F8 | ¹³⁹GDLWVPEES¹⁴⁷ | 139-147 |
| 2F6 | | |
| 3A7 | ¹⁴²WVPEESSSFEG¹⁵² | 142-152 |
| 7E5 | | |

[0580] As indicated in Table 8A, antibodies 5A2 and 7D1 showed robust binding exclusively for peptides within two extracellular domains (including the IgV domain) of human TREM2. As indicated in Table 8A, the peptides recognized by antibodies 5A2 and 7D1 correspond to amino acid residues 35-49 and 140-150 of SEQ ID NO: 1 and have the amino acid sequences of: SCPYDSMKHWGRRKA and DLWFPGESESF.

[0581] As indicated in Table 8A, antibody 8E10 showed robust binding exclusively for peptides within the extracellular IgV domain of human TREM2. As indicated in Table 8A, the peptides recognized by antibody 8E10 correspond to amino acid residues 39-49 and 63-77 of SEQ ID NO: 1 and have the amino acid sequences of: DSMKHWGRRKA and VVSTHNLWLLSFLRR.

[0582] As indicated in Tables 8A and 8B, antibody 2H8 showed robust binding exclusively for a peptide within the extracellular IgV domain of human and mouse TREM2. As indicated in Table 8A, the human TREM2 peptide recognized by antibody 2H8 corresponds to amino acid residues 51-61 of SEQ ID NO: 1 and has the amino acid sequence of: CRQLGEKGPCQ. As indicated in Table 8B, the mouse TREM2 peptide recognized by antibody 2H8 corresponds to amino acid residues 51-61 of SEQ ID NO: 2 and has the amino acid sequence of: CRQLGEEGPCQ.

[0583] As indicated in Table 8A, antibody 18E4 showed robust binding exclusively for peptides within the extracellular domain of human TREM2. As indicated in Table 8A, the peptides recognized by antibody 18E4 correspond to amino acid residues 55-62, 104-109, and 148-158 of SEQ ID NO: 1 and have the amino acid sequences of: GEKGPCQR, DAGLYQ, and ESFEDAHVEHS. Moreover, it was determined that a key sequence involved in binding corresponds to amino acid residues 151-155 of SEQ ID NO: 1 and has the amino acid sequence of: EDAHV.

[0584] As indicated in Table 8A, antibody 44A8 showed robust binding exclusively for peptides within the extracellular domain of human TREM2. As indicated in Table 8A, the peptides recognized by antibody 44A8 correspond to amino acid residues 55-62, 104-109, and 160-166 of SEQ ID NO: 1 and have the amino acid sequences of: GEKGPCQR, DAGLYQ, and SRSLLEG. Moreover, it was determined that a key sequence involved in binding corresponds to amino acid residues 162-165 of SEQ ID NO: 1 and has the amino acid sequence of: SLLE.

[0585] As indicated in Table 8A, antibody 18D8 showed robust binding exclusively for peptide within the extracellular domain of human TREM2. As indicated in Table 8A, the peptide recognized by antibody 18D8 correspond to amino acid residues 55-65 and 124-134 of SEQ ID NO: 1 and have the amino acid sequences of: GEKGPCQRVVS and VLVEVLADPLD.

[0586] As indicated in Table 8A, antibodies 49E12 and 11D7 showed robust binding exclusively for peptides within the extracellular domain of human TREM2. As indicated in Table 8A, the peptides recognized by antibodies 49E12 and 11D7 correspond to amino acid residues 63-73 and 156-170 of SEQ ID NO: 1 and have the amino acid sequences of: VVSTHNLWLLS and EHSISRSLLEGEIPF.

[0587] As indicated in Table 8A, antibody 6H6 showed robust binding exclusively for a peptide within the extracellular domain of human TREM2. As indicated in Table 8A, the peptide recognized by antibody 6H6 corresponds to amino acid residues 117-133 of SEQ ID NO: 1 and has the amino acid sequence of: EADTLRKVLVEVLADPL.

[0588] As indicated in Table 8A, antibodies 8C3, 7E9, 12F9, 9G1, 9G3, 11A8, and 7B3 showed robust binding exclusively for a peptide within the extracellular domain of human TREM2. As indicated in Table 8A, the peptide recognized by antibodies 8C3, 7E9, 12F9, 9G1, 9G3, 11A8, and 7B3 corresponds to amino acid residues 137-146 of SEQ ID NO: 1 and has the amino acid sequence of: DAGDLWFPGE.

[0589] As indicated in Tables 8A and 8B, antibodies 3B10 and 8F8 showed robust binding exclusively for a peptide within the extracellular domain of human and mouse TREM2. As indicated in Table 8A, the human TREM2 peptide recognized by antibodies 3B10 and 8F8 corresponds to amino acid residues 139-147 of SEQ ID NO: 1 and has the amino acid sequence of: GDLWFPGES. As indicated in Table 8B, the mouse TREM2 peptide recognized by antibodies 3B10 and 8F8 corresponds to amino acid residues 139-147 of SEQ ID NO: 2 and has the amino acid sequence of: GDLWVPEES. Moreover, the human and mouse peptide recognized by antibodies 3B10 and 8F8 has the amino sequence of: GDLW[F/V]P[G/E]ES (SEQ ID NO: 884).

[0590] As indicated in Table 8A, antibodies 11H5, 6G12, 10A9, 10C1, and 3A2 showed robust binding exclusively for a peptide within the extracellular domain of human TREM2. As indicated in Table 8A, the peptide recognized by antibodies 11H5, 6G12, 10A9, 10C1, and 3A2 corresponds to amino acid residues 139-149 of SEQ ID NO: 1 and has the amino acid sequence of: GDLWFPGESES.

[0591] As indicated in Tables 8A and 8B, antibody 2F6 showed robust binding exclusively for a peptide within the extracellular domain of human and mouse TREM2. As indicated in Table 8A, the human TREM2 peptide recognized by antibody 2F6 corresponds to amino acid residues 139-149 of SEQ ID NO: 1 and has the amino acid sequence of: GDLWFPGESES. As indicated in Table 8B, the mouse TREM2 peptide recognized by antibody 2F6 corresponds to amino acid residues 139-147 of SEQ ID NO: 2 and has the amino acid sequence of: GDLWVPEES.

[0592] As indicated in Table 8A, antibodies 1B4, 29F6, 7B11, 40D5, 45D6, 29F7, and 21D10 showed robust binding exclusively for a peptide within the extracellular domain of human and mouse TREM2. As indicated in Table 8A, the peptide recognized by antibodies 1B4, 29F6, 7B11, 40D5, 45D6, 29F7, and 21D10 corresponds to amino acid residues 140-146 of SEQ ID NO: 1 and has the amino acid sequence of: DLWFPGE. Moreover, it was determined that a key sequence involved in binding corresponds to amino acid residues 140-143 of SEQ ID NO: 1 and has the amino acid sequence of: DLWF.

[0593] As indicated in Tables 8A and 8B, antibodies 3A7 and 7E5 showed robust binding exclusively for a peptide within the extracellular domain of human and mouse TREM2. As indicated in Table 8A, the human TREM2 peptide recognized by antibodies 3A7 and 7E5 corresponds to amino acid residues 142-152 of SEQ ID NO: 1 and has the amino acid sequence of: WFPGESESFED. As indicated in Table 8B, the mouse TREM2 peptide recognized by antibodies 3A7 and 7E5 corresponds to amino acid residues 142-152 of SEQ ID NO: 1 and has the amino acid sequence of: WVPEESSSFEG.

[0594] As indicated in Table 8A, antibody 6H2 showed robust binding exclusively for a peptide within the extracellular domain of human TREM2. As indicated in Table 8A, the peptide recognized by antibody 6H2 corresponds to amino acid residues 146-154 of SEQ ID NO: 1 and has the amino acid sequence of: ESESFEDAH. Moreover, it was determined that key amino acid residues involved in binding correspond to amino acid residues S149 and F150 of SEQ ID NO: 1.

[0595] As indicated in Table 8A, antibodies 12G6 and 9F5 showed robust binding exclusively for a peptide within the extracellular domain of human TREM2. As indicated in Table 8A, the peptide recognized by antibodies 12G6 and 9F5 corresponds to amino acid residues 149-157 of SEQ ID NO: 1 and has the amino acid sequence of: SFEDAHVEH.

[0596] As indicated in Table 8A, antibodies 2A7 and 9B4 showed robust binding exclusively for a peptide within the extracellular domain of human TREM2. As indicated in Table 8A, the peptide recognized by antibodies 2A7 and 9B4 corresponds to amino acid residues 154-161 of SEQ ID NO: 1 and has the amino acid sequence of: HVEHSISR.

[0597] Shotgun Mutagenesis Epitope Mapping

[0598] Shotgun mutagenesis epitope mapping of anti-TREM2 antibodies (9F5 (MAb), T21-9 (Fab), T22 (Fab), and T45-10 (Fab)) was performed using an alanine-scanning library for the TREM2 protein. A TREM2-Dap12 expression construct encoding a full length hTREM2-Dap12 chimera was subjected to high-throughput alanine scanning mutagenesis (outlined in Davidson and Doranz, 2014 Immunology 143, 13-20) to generate a comprehensive mutation library. Each of residues 19 to 174 of TREM2 was mutated, representing the TREM2 extracellular domain, most to alanine, while alanine codons were mutated to serine. In total, 154 TREM2 mutant expression constructs were generated, sequences confirmed, and arrayed into a 384-well plate, one mutant per well.

[0599] The TREM2 mutation library clones, arrayed in a 384-well microplate, were transfected individually into HEK-293T cells and allowed to express for 22 hours. Cells were then incubated with the indicated MAb or Fabs diluted in 10% normal goat serum (NGS) (Sigma-Aldrich, St. Louis, Mo.). Prior to library screening, primary MAb and Fab concentrations were determined using an independent immunofluorescence titration curve against cells expressing wild-type TREM2 to ensure that signals were within the linear range of detection. The MAb was detected using 3.75 μg/ml AlexaFluor488-conjugated secondary antibody (Jackson ImmunoResearch Laboratories, Westgrove, Pa., Cat. #115-545-003) in 10% NGS, while the Fabs were detected using 7.50 μg/ml AlexaFluor488-conjugated secondary antibody (Jackson ImmunoResearch Laboratories, Westgrove, Pa., Cat. #109-546-006) in 10% NGS. Cells were washed twice with PBS −/− and resuspended in Cellstripper (Cellgro, Manassas, Va.) with 0.1% BSA (Sigma-Aldrich, St. Louis, Mo.). Mean cellular fluorescence was detected using the Intellicyt High Throughput Flow Cytometer (HTFC, Intellicyt, Albuquerque, N. Mex.). MAb and Fab reactivities against each mutant clone were calculated relative to wild-type TREM2 protein reactivity by subtracting the signal from mock-transfected controls, and normalizing to the signal from wild-type TREM2-transfected controls.

[0600] Mutated residues within critical clones were identified as critical to the MAb or Fab epitope if they did not support reactivity of the test MAb or Fab but did support reactivity of other test antibodies. This counter-screen strategy facilitated the exclusion of TREM2 mutants that were locally misfolded or that had an expression defect.

[0601] FIG. 4E depicts the mean binding reactivities and ranges for all critical residues identified in the screens. The range was the difference between the duplicate experimental binding values. Primary critical residues were identified as residues where mutations were negative for test antibody binding (<30% of binding to WT for Fab T21-9; <20% of binding to WT for MAb 9F5 and Fabs T22 and T45-10) but positive for other test antibodies (>70% WT).

[0602] The amino acid residues critical for antibody binding are listed in Table 8C.

TABLE 8C
Residues involved in anti-TREM2 antibody MAb and Fab binding

| Antibody | Critical TREM2 residues | Secondary TREM2 residues |
|---|---|---|
| 9F5 MAb | E₁₅₁; D₁₅₂; H₁₅₄; and E₁₅₆ | |
| T21-9 Fab | K₄₂ and H₁₁₄ | |
| T22 Fab | K₄₂; G₄₅; and H₁₁₄ | H₄₃; W₄₄; and E₁₁₇ |
| T45-10 Fab | R₇₇ | H₆₇ and T₈₈ |

[0603] As indicated in Table 8C, the critical TREM2 residues involved in binding by MAb 9F5 corresponded to amino acid residues E₁₅₁, D₁₅₂, H₁₅₄, and E₁₅₆ of SEQ ID NO: 1. The critical TREM2 residues involved in binding by Fab T21-9 corresponded to amino acid residues K₄₂ and H₁₁₄ of SEQ ID NO: 1. The critical TREM2 residues involved in binding by Fab T22 corresponded to amino acid residues K₄₂, G₄₅, and H₁₁₄ of SEQ ID NO: 1; and the secondary residues involved in binding by Fab T22 correspond to amino acid residues H₄₃, W₄₄, and E₁₁₇. The critical TREM2 residue involved in binding by Fab T45-10 corresponded to amino acid residue R₇₇ of SEQ ID NO: 1; and the secondary residues involved in binding by Fab T45-10 correspond to amino acid residues H₆₇ and T₈₈. The secondary residues involved in binding by Fab T22 and Fab T45-10 contribute to a lesser extent to the overall energy of binding.

### Example 3: TREM2 Antibodies Induce Syk Phosphorylation

[0604] Spleen tyrosine kinase (Syk) is an intracellular signaling molecule that functions downstream of TREM2 by phosphorylating several substrates, thereby facilitating the formation of a signaling complex leading to cellular activation and inflammatory processes. The ability of agonist TREM2 antibodies to induce Syk activation was determined by culturing mouse macrophages and measuring the phosphorylation state of Syk protein in cell extracts.

[0605] Bone marrow-derived macrophages (BMDM) from wild-type (WT) mice, from TREM2 knockout (KO) mice, and from mice that lack expression of functional Fc receptor common gamma chain gene (FcgR KO; REF: Takai T 1994. Cell 76(3):519-29) were starved for 4 hours in 1% serum RPMI and then removed from tissue culture dishes with PBS-EDTA, washed with PBS, and counted. The cells were coated with full-length TREM2 antibodies 2F6, 11H5, 2H8, 1H7, 3A7, 3B10, 7F8, and 7E5, or with control antibodies (10A9 or msIgG1 isotype control) for 15 minutes on ice. After washing with cold PBS, cells were incubated at 37° C. for the indicated period of time in the presence of goat anti-human IgG. After stimulation, cells were lysed with lysis buffer (1% v/v NP-40%, 50 Mm Tris-HCl (pH 8.0), 150 mM NaCl, 1 mM EDTA, 1.5 mM MgCl₂, 10% glycerol, plus protease and phosphatase inhibitors) followed by centrifugation at 16,000 g for 10 mM at 4° C. to remove insoluble materials. Lysates were then immunoprecipitated with anti-Syk antibody (N-19 for BMDM or 4D10 for human DCs, Santa Cruz Biotechnology). Precipitated proteins were fractionated by SDS-PAGE, transferred to PVDF membranes and probed with anti-phosphotyrosine antibody (4G10, Millipore). To confirm that all substrates were adequately immunoprecipitated, immunoblots were reprobed with anti-Syk antibody (Abcam, for BMDM) or anti-Syk (Novus Biological, for human DCs). Visualization was performed with the enhanced chemiluminescence (ECL) system (GE healthcare), as described (e.g., Peng et al., (2010) Sci Signal., 3(122): ra38).

[0606] As shown in FIG. 5A, TREM2 antibodies 2F6, 11H5, 2H8, 1H7, 3A7, 3B10, 7F8, and 7E5 induced TREM2-mediated Syk phosphorylation in BMDMs. Syk phosphorylation induced by antibodies 7E5, 3A7, and 2F6 is TREM2-specific, as Syk phosphorylation was not induced when TREM2 KO BMDM were used as a control (FIG. 5B). Syk phosphorylation induced by antibodies 7E5 and 3A7 does not require Fc receptor common gamma chain (FcgR), as Syk phosphorylation was not induced when FcgR KO BMDM were used as a control (FIG. 5B). Control antibodies 10A9 and msIgG1 did not induce a significant amount of Syk phosphorylation. Based on these results, TREM2 antibodies 2F6, 11H5, 2H8, 1H7, 3A7, 3B10, 7F8, and 7E5 function as agonist antibodies that induce Syk phosphorylation in macrophages.

### Example 4: TREM2 Antibodies Induce Syk Phosphorylation when Clustered by Adjacent Cells that Expresses Fc Gamma Receptors

[0607] Activation of spleen tyrosine kinase (Syk) is facilitated by crosslinking two or more TREM2 receptors with antibodies, thereby facilitating the formation of a signaling complex leading to cellular activation and inflammatory processes. In vivo cross-linking is mediated by adjacent cells that express high affinity Fc receptors (FcR), such as B cells and other leukocytes (White AL Cancer Immunol Immunother (2013) 62:941-948; Wilson N S 2011, Cancer Cell 19, 101-113; Bartholomaeus P J Immunol 2014; 192:2091-2098).

[0608] The ability of Fc receptors to induce activation of Syk through antibody clustering was determined by culturing mouse macrophages in the presence of cells expressing Fc receptors and measuring the phosphorylation state of Syk protein in cell extracts. Bone marrow-derived macrophages (BMDM) from wild-type (WT) mice and from TREM2 knockout (KO) mice were starved for 4 hours in 1% serum RPMI and then removed from tissue culture dishes with PBS-EDTA, washed with PBS, and counted. The cells were coated with full-length TREM2 antibodies 2F6, 11H5, 2H8, 1H7, 3A7, 3B10, 7F8, and 7E5, or control antibodies (10A9 or msIgG1 isotype control) for 15 minutes on ice. After washing with cold PBS, cells were incubated for 5 minutes at 37° C. with glutaraldehyde-fixed cells that express Fc receptors and that were previously prepared as follows. Briefly, Fc receptors expressing cells were either B cells isolated from mouse spleens using MACS microbeads (CD19⁺ B-cell isolation kit Miltenyi Biotec) according to the manufacturer's protocol or alternatively the P815 cell line that overexpresses FcR2b and FcR3. 2×10⁶ cells/ml cells were fixed with 0.05% glutaraldehyde for 1 minute at room temperature, the reaction was stopped with 1 μM Glycine and cells were then washed extensively with PBS. After stimulation, cells were lysed with lysis buffer (1% v/v NP-40%, 50 Mm Tris-HCl (pH 8.0), 150 mM NaCl, 1 mM EDTA, 1.5 mM MgCl₂, 10% glycerol, plus protease and phosphatase inhibitors) followed by centrifugation at 16,000 g for 10 mM at 4° C. to remove insoluble materials. Lysates were then immunoprecipitated with anti-Syk antibody (N-19 for BMDM or 4D10 for human DCs, Santa Cruz Biotechnology). Precipitated proteins were fractionated by SDS-PAGE, transferred to PVDF membranes and probed with anti-phosphotyrosine antibody (4G10, Millipore). To confirm that all substrates were adequately immunoprecipitated, immunoblots were reprobed with anti-Syk antibody (Abcam, for BMDM) or anti-Syk (Novus Biological, for human DCs). Visualization was performed with the enhanced chemiluminescence (ECL) system (GE healthcare), as described (e.g., Peng et al., (2010) Sci Signal., 3(122): ra38).

[0609] TREM2 antibodies 3A7 and 7E5 induced TREM-2 mediated Syk phosphorylation in BMDMs upon clustering with P815 cells, while antibodies 8F8 and 2F6 did not activate Syk phosphorylation, as compared to the isotype control msIgG1 (FIG. 6A). Syk phosphorylation induced by antibodies 3A7 and 7E5 is TREM2-specific, as Syk phosphorylation was not induced when TREM2 KO BMDM were used as a control (FIG. 6A). TREM2 antibodies 2F6, 3A7, and 7E5 induced TREM2-mediated Syk phosphorylation in BMDMs upon clustering with primary splenic B cells, while antibody 8F8 did not activate Syk phosphorylation, as compared to the isotype control msIgG1 (FIG. 6B). Based on these results, TREM2 antibodies 7E5, 3A7, and 2F6 are agonist antibodies that induce Syk phosphorylation in primary macrophages when clustered by adjacent cell that expresses Fc gamma receptors.

### Example 5: TREM2 Antibodies Induce DAP12 Phosphorylation In Vitro and In Vivo

[0610] DAP12 Phosphorylation in Mouse Macrophages

[0611] TREM2 signals through DAP12, leading downstream to activation of PI3K and other intracellular signals. The ability of TREM2 antibodies to induce DAP12 activation was determined by culturing mouse macrophages and measuring the phosphorylation state of DAP12 protein in cell extracts. Before stimulation with antibodies, mouse wild-type (WT) bone marrow-derived macrophages (BMDM) and TREM2 knockout (KO) BMDM were starved for 4 h in 1% serum RPMI. 15×10⁶ cells were incubated in ice for 15 mM with full-length TREM2 antibodies or control antibodies. Cells were washed and incubated at 37° C. for the indicated period of time in the presence of goat anti-human IgG. After stimulation, cells were lysed with lysis buffer (1% v/v n-Dodecyl-β-D-maltoside, 50 Mm Tris-HCl (pH 8.0), 150 mM NaCl, 1 mM EDTA, 1.5 mM MgCl₂, 10% glycerol, plus protease and phosphatase inhibitors), followed by centrifugation at 16,000 g for 10 mM at 4° C. to remove insoluble materials. Cell lysate was immunoprecipitated with a second TREM2 antibody (R&D Systems). Precipitated proteins were fractionated by SDS-PAGE, transferred to PVDF membranes, and probed with anti-phosphotyrosine Ab (4G10, Millipore). The membrane was stripped and reprobed with anti-DAP12 antibody (Cells Signaling, D7G1X). Each cell lysate used for TREM2 immunoprecipitations contained an equal amount of proteins, as indicated by a control antibody (anti-Actin, Santa Cruz).

[0612] As shown in FIGS. 7A and 7B, DAP12 co-precipitated with TREM2 and was phosphorylated in WT macrophages incubated with TREM2 antibodies 11H5, 2F6, 3A7, 7E5, and 3B10, but not with antibodies 11A2, 4G3, 12F9, and 7A9, or the isotype control msIgG1 (FIGS. 7A and 7B). As a control, no DAP12 phosphorylation was observed in TREM2 KO (TREM2^{-/-}) macrophages incubated with antibodies 2F6 or 7E5 (FIG. 7B). These results demonstrate that TREM2 antibodies 2F6 and 7E5 are agonist antibodies that induce phosphorylation of TREM2-associated DAP12 in a TREM2-specific manner, as DAP12 phosphorylation is absent in TREM2-deficient BMDM.

[0613] In Vivo DAP12 Phosphorylation

[0614] The ability of TREM2 antibodies to induce DAP12 activation was determined in vivo on Brewer's Thioglycollate-induced peritoneal macrophages and measuring the phosphorylation state of DAP12 protein in cell extracts. C57B16 mice were injected intraperitoneally (i.p.) with 3 ml of 3% Brewer's Thioglycollate at day 0. At day 3, mice were injected intraperitoneally (i.p.) with isotype control antibody (CTR antibody) mIgG1 (clone MOPC-21, Bioxcell) or with anti-TREM2 antibody 7E5 for 15 minutes (FIGS. 7C and 7D) or for 24 hours (FIGS. 7E and 7F). Peritoneal cavity (PEC) cells were harvested by peritoneal lavage using 4 mL saline solution and washed with PBS. Cells were then lysed with lysis buffer (1% v/v n-Dodecyl-β-D-maltoside), 50 Mm Tris-HCl (pH 8.0), 150 mM NaCl, 1 mM EDTA, 1.5 mM MgCl₂, 10% glycerol, plus protease and phosphatase inhibitors), followed by centrifugation at 16,000 g for 10 mM at 4° C. to remove insoluble materials. Lysates recovered from each mouse sample were split and immunoprecipitated with a second TREM2 antibody (R&D Systems) or with isotype control Rat IgG2b antibody directly conjugated with beads. Precipitated proteins were fractionated by SDS-PAGE, transferred to PVDF membranes, and probed with anti-phosphotyrosine Ab (4G10, Millipore). The membrane was stripped and reprobed with anti-DAP12 antibody (Cells Signaling, D7G1X). Each cell lysate used for TREM2 immunoprecipitations was also probed with a control antibody (anti-Actin, Santa Cruz). The peritoneal fluid includes cells that express high levels of TREM2, as well as other cell types (e.g., eosinophils), and the number of cells harvested may vary. Therefore, some lysates recovered after immunoprecipitation were loaded on a gel and blotted with anti-actin.

[0615] This blot gives an indication of the total amount of cells (TREM2⁺ cells and TREM2⁻ cell) that were lysed. The graphs shown in FIGS. 7D and 7F indicate the fold change (FC) of TREM2-associated DAP12 phosphorylation upon in vivo stimulation with anti-TREM2 antibody 7E5 stimulation over the CTR antibody. Phosphorylated TREM2-associated DAP12 was normalized based on the amount of DAP12-associated TREM2.

[0616] It was previously shown that in vitro cross-linking (via cells expressing FcR) of anti-TREM2 antibody 7E5 induces clustering of TREM2 and induces TREM2-associated DAP12 phosphorylation. The results in FIG. 7C-7F indicate that DAP12 co-precipitated with TREM2 and was phosphorylated in peritoneal cells from mice treated with antibody 7E5, but not with the isotype control antibody (msIgG1). The results demonstrate that TREM2 antibody 7E5 is an agonist antibody that induces phosphorylation of TREM2-associated DAP12 in a TREM-2-specific manner, as DAP12 phosphorylation is absent in mice treated with control antibody.

### Example 6: Plate-Bound TREM2 Antibodies Induce TREM2-Dependent NFAT Promoter

[0617] The ability of plate-bound full-length anti-TREM2 antibodies to activate mouse or human TREM2-dependent genes was evaluated using a luciferase reporter gene under the control of an NFAT (nuclear factor of activated T-cells) promoter. The cell line BW5147.G.1.4 (ATCC® TIB48TM), derived from mouse thymus lymphoma T lymphocytes, was infected with mouse TREM2 and DAP12, and with Cignal Lenti NFAT-Luciferase virus (Qiagen). Alternatively the BW5147.G.1.4 cell line was infected with a human TREM2/DAP12 fusion protein, and with Cignal Lenti NFAT-Luciferase virus (Qiagen). As a positive control for signaling, PMA (0.05 ug/ml) and ionomycin (0.25 uM) were added together. Anti-TREM2 and isotype control antibodies were dissolved in PBS, plated on tissue culture plates at a concentration of 10 ug/ml and incubated overnight at 4° C. to allow the antibodies to absorb to the plate. After washing of the plates, cells were plated on the plate-bound antibodies and incubated for 6 hours. Luciferase activity was measured by adding OneGlo Reagent (Promega) to each well and incubating 3 min at room temperature on a plate shaker. Luciferase signal was measured using a BioTek plate reader. The cells display tonic TREM2-dependent signaling due to either the presence of an endogenous ligand or to spontaneous receptor aggregation, which leads to TREM2 signaling in the absence of additional stimulation.

[0618] As shown in FIG. 8A, anti-TREM2 antibodies 2F6, 3A7, 7E5, 7F8, 8F8, and 11H5 increased luciferase activity in cells expressing mouse TREM2, as compared to the isotype control (msIgG1), indicating that the antibodies were able to induce TREM2-dependent gene transcription. As shown in FIG. 8B, anti-TREM2 antibodies 9F5, 9G3, 11A8, 12D9, 12F9, 12G6, 3C1, and 4D7 increased luciferase activity in cells expressing human TREM2, as compared to the isotype control (msIgG1), indicating that the antibodies were able to induce TREM2-dependent gene transcription. The dotted lines in FIGS. 8A and 8B indicate the levels of TREM2 activity without stimulation. FIGS. 8C and 8D show that plate-bound phosphatidylserine (PS) and sphingomyelin (SM) also induce NFAT promoter signaling in cells that express mouse TREM2 (FIG. 8C) and in cells that express human TREM2 (FIG. 8D). It is believed that PS and SM are natural ligands of TREM2. Thus, the results in FIG. 8A-8D indicate that agonist anti-TREM2 antibodies can mimic a natural ligand of TREM2.

### Example 7: TREM2 Ligands Induce TREM2-Dependent NFAT Promoter

[0619] The ability of natural TREM2 ligands to activate mouse or human TREM2-dependent genes was evaluated using the cell based luciferase reporter system described in Example 6. Plates were coated overnight with increasing concentration of phosphatidyl serine (PS), Sphingomyelin (SM) and human APOE variants APOE2, APOE3, and APOE4. After washing of the plates, cells were plated and incubated for 6 hours at 37° C. Luciferase activity was then measured by adding OneGlo Reagent (Promega), as described in Example 6. As previously describe, PS, SM, and the APOE variants provide activation of TREM2-dependent signaling.

[0620] Additionally, the ability of APO variants APOE2, APOE3, and APOE4 to bind recombinant human TREM2 protein was evaluated by ELISA. 2 μg/ml of ApoE protein was coated on high binding ELISA plates overnight at 4° C. On day 2, the plates were washed three times with 0.05% Tween in 1×PBS. Plates were then blocked with 3% milk at room temperature for 1 hour. The plates were incubated with 20 nM of TREM2-Fc protein. Then plates were washed 3 times at room temperature and incubated with secondary antibody goat anti-human Fc HRP for 1 hour. Plates were washed again three times at room temperature and 100 μL of TMB was added to each well. After the reaction had come to completion, 50 μL of 2N sulfuric acid was added per well to stop the reaction. Plates were read with a plate reader at 630 and 450 nm.

[0621] FIG. 8E shows that plate-bound APOE2, APOE3, and APOE4 also induce NFAT promoter activity in cells that express human TREM2. It is believed that the different APOE isoforms are natural ligand of TREM2. FIG. 8F shows that different APOE alleles (APOE2, APOE3 and APOE4) bind to recombinant TREM2 protein in an ELISA assay. Thus, the results indicate that agonistic anti-TREM2 antibodies can mimic a natural ligand of TREM2.

### Example 8: Soluble TREM2 Antibodies Induce TREM2-Dependent Genes

[0622] The ability of soluble full-length anti-TREM2 antibodies to activate mouse or human TREM2-dependent genes was evaluated using a luciferase reporter gene under the control of an NFAT (nuclear factor of activated T-cells) promoter. The cell line BW5147.G.1.4 (ATCC® TIB48TM), derived from mouse thymus lymphoma T lymphocytes, was infected with mouse TREM2 and DAP12, and with Cignal Lenti NFAT-Luciferase virus (Qiagen). Alternatively the BW5147.G.1.4 cell line was infected with a human TREM2/DAP12 fusion protein, and with Cignal Lenti NFAT-Luciferase virus (Qiagen). As a positive control for signaling, PMA (0.05 ug/ml) and ionomycin (0.25 uM) were added together. Cells were incubated together with soluble anti-TREM2 and isotype control antibodies for 6 hours and luciferase activity was measured by adding OneGlo Reagent (Promega) to each well and incubating 3 min at room temperature on a plate shaker. Luciferase signal was measured using a BioTek plate reader. The cells display tonic TREM2-dependent signaling due to either the presence of an endogenous ligand or to spontaneous receptor aggregation, which leads to TREM2 signaling.

[0623] As shown in FIG. 9A, soluble full-length anti-TREM2 antibodies 2F6, 3A7, 3B10, 7E5, 8F8, and 11H5 increased luciferase activity in cells expressing mouse TREM2, as compared to the isotype control (msIgG1), indicating that the antibodies are agonist antibodies that are able to induce TREM2-dependent gene transcription. In contrast, soluble, full-length anti-TREM2 antibodies 1H7, 2H8, and 7F8 appeared to act as antagonists to block tonic TREM2 signaling. The dotted line in FIG. 9A indicates the levels of TREM2 activity without stimulation.

[0624] As shown in FIG. 9B, anti-TREM2 antibodies 9F5, 12F9, 2C7, 2F5, 3C1, and 4D7 increased luciferase activity in cells expressing human TREM2, as compared to the isotype control (msIgG1), indicating that the antibodies are agonist antibodies that are able to induce TREM2-dependent gene transcription. In contrast, soluble full-length anti-TREM2 antibodies, such as 10A9 and 10C1, appeared to act as antagonists to block tonic TREM2 signaling. The dotted line in FIG. 9B indicates the levels of TREM2 activity without stimulation.

[0625] FIG. 9C shows a dose response curve of luciferase activity induced by increasing concentrations of soluble full-length anti-TREM2 antibody 7E5, indicating that the effect on gene expression is dose dependent and that the EC₅₀ is approximately 1.52 nM.

[0626] Taken together with the results in FIGS. 8C and 8D, the results in FIG. 9A-9C indicate that soluble agonist anti-TREM2 antibodies can induce gene expression to an extent that is similar to plate-bound phosphatidylserine (PS), which is believed to be a natural ligand of TREM2.

### Example 9: Analysis of the Ability of Soluble TREM2 Antibodies to Enhance the Activity of Natural Ligands of TREM2

[0627] The ability of soluble full-length anti-TREM2 antibodies to enhance the activity of natural ligands of mouse TREM2 or human TREM2 was evaluated using a luciferase reporter gene under the control of an NFAT (nuclear factor of activated T-cells) promoter to measure activation of gene expression. The cell line BW5147.G.1.4 (ATCC® TIB48TM), derived from mouse thymus lymphoma T lymphocytes, was infected with mouse TREM2 and DAP12, and with Cignal Lenti NFAT-Luciferase virus (Qiagen). Alternatively the BW5147.G.1.4 cell line was infected with a human TREM2/DAP12 fusion protein, and with Cignal Lenti NFAT-Luciferase virus (Qiagen). Cells were incubated for 6 hours, together with soluble anti-TREM2 and isotype control antibodies, on plates that were pre-coated with increasing concentrations of phosphatidylserine (PS) or sphingomyelin (SM). Luciferase activity was measured by adding OneGlo Reagent (Promega) to each well and incubating 3 min at room temperature on a plate shaker. Luciferase signal was measured using a BioTek plate reader.

[0628] Additionally, the ability of soluble full-length anti-TREM2 antibodies to enhance APOE3 binding to recombinant human TREM2 protein was evaluated by ELISA. 1 μg/ml of ApoE protein was coated on high binding ELISA plates overnight at 4° C. On day 2, the plates were washed three times with 0.05% Tween in 1×PBS. Plates were then blocked with 3% milk at room temperature for 1 hour. The plates were incubated with 20 nM of TREM2-Fc protein and either 15 μg/ml or 5 μg/ml of the TREM2 antibody per well. Then plates were washed three times at room temperature and incubated with secondary antibody goat anti-human Fc HRP for 1 hour. Plates were washed again three times at room temperature and 100 μL of TMB was added to each well. After the reaction came to completion, 50 μL of 2N sulfuric acid was added per well to stop the reaction. Plates were read with a plate reader at 630 and 450 nm.

[0629] As shown in FIGS. 10A and 10B, the soluble full-length anti-TREM2 antibody 7E5 increased the potency and the maximal effect of phosphatidylserine (PS) in cells expressing mouse TREM2, as compared to the isotype control (msIgG1). 7E5 also increased the maximal effect of sphingomyelin (SM) in cells expressing mouse TREM2, as compared to the isotype control (msIgG1) (FIGS. 10C and 10D). These results indicate that antibody 7E5 was able to enhance TREM2-dependent gene transcription induced by PS and SM, which are believed to be natural ligands of TREM2.

[0630] As shown in FIG. 10E, anti-TREM2 antibodies 3A7, 2F6, 11H5, and 8F8 increased the maximal effect of phosphatidylserine (PS) in cells expressing mouse TREM2, as compared to the isotype control (msIgG1), indicating that these antibodies were able to enhance TREM2-dependent gene transcription induced by natural ligands, such as PS.

[0631] FIG. 10F shows that in contrast to agonistic anti-TREM2 antibody 7E5, a commercial anti-TREM2 antibody (R&D Cat#F7E57291) inhibits the activity of sphingomyelin (SM).

[0632] As shown in FIG. 11A, soluble full-length anti-TREM2 antibody 9F5 increased the maximal effect of phosphatidylserine (PS) in cells expressing human TREM2. This result indicates that antibody 9F5 was able to enhance TREM2-dependent gene transcription induced by PS, which is believed to be a natural ligand of TREM2. As a control, mouse IgG1 isotype antibody had no effect (FIG. 11B).

[0633] Similar to antibody 9F5, anti-TREM2 antibodies 7B3, 9G1, 9G3, 11A8, 12F9, 3B10, and 8F8 also increased the maximal effect of phosphatidylserine (PS) in cells expressing human TREM2, as compared to the isotype control (msIgG1) (FIGS. 11C and 11D). These results indicate that these antibodies were able to enhance TREM2-dependent gene transcription induced by natural ligands, such as PS.

[0634] As shown in FIGS. 11E and 11F, soluble full-length anti-TREM2 antibody 9F5 increased the strength of binding of a recombinant human TREM2 to APOE3 in an ELISA binding assay. The results indicate that antibody 9F5 was able to stabilize the binding to a natural ligand of TREM2. By contrast other antibodies, such as antibody 9G3, antagonized the binding of TREM2 to APOE3. As a control, a mouse IgG1 isotype antibody had no effect.

[0635] Together with the results in FIG. 8A-8F and FIG. 9A-9C, these results demonstrate that agonistic anti-TREM2 antibodies synergize with natural ligands of TREM2, such as PS, SM, and APOE, to enhance TREM2-dependent gene transcription, as the increased level in TREM2-dependent gene transcription induced by the combination of agonistic anti-TREM2 antibodies and TREM2 ligand was greater than the cumulative level in TREM2-dependent gene transcription that would be expected when the levels induced by the anti-TREM2 antibody alone and TREM2 ligand alone are added together.

### Example 10: TREM2 Antibodies Induce Macrophage Killing

[0636] The antagonistic functionality of soluble, non-cross-linked anti-TREM2 antibodies was evaluated in innate immune cells (e.g., bone marrow-derived macrophages).

[0637] Bone marrow-derived macrophages obtained from C57B16 mice were plated on non-tissue-culture-treated 96-well plates in the presence of 20 ng/ml M-CSF and 10 μg/ml of soluble, non-cross-linked anti-TREM2 antibodies 1H7, 2F6, 2H8, 2A7, 7E5, 7F8, 8F8, R&D (R&D Cat#F7E57291), or mouse IgG1 (mIgG1) or rat IgG2b (R IgG2b) as isotype controls. Each condition was plated in triplicate. Analysis of cell viability was performed using a CellTiter-Glo® kit (Promega) 3 days later. Plates were read with a BioTek Synergy™ Microplate Reader using GENS™ 2.04 software.

[0638] In FIG. 12A, the dotted line indicates the average cell viability obtained with untreated macrophages (i.e., no antibody added). The 0% reference indicates the average cell viability obtained when macrophages were cultured in the absence of M-CSF.

[0639] When macrophage cell viability was evaluated with soluble, non-cross-linked anti-TREM2 antibodies, the results indicated that antibodies 1H7, 2H8, and 7F8, and commercial antibody R&D decrease cell viability by ˜50% after 3 days of culture. By contrast, antibodies 3A7, 7E5, 2F6, and 8F8 do not have significant cytotoxic effects on primary macrophages.

### Example 11: TREM2 Increases Survival of Immune Cells

[0640] In Vitro Cell Survival

[0641] To evaluate the ability of anti-TREM2 antibodies to enhance cell survival in vitro, macrophages deficient in the gamma chain subunit of FcgRI, FcgRIII, and FceRI receptors (Fcgrl KO mice, REF: Takai T, Li M, Sylvestre D, Clynes R, Ravetch J. (1994). Cell, 76:519-529) were cultured in the presence of plate-bound anti-TREM2 antibodies and cell viability was determined when cells were cultured in suboptimal growth conditions.

[0642] Murine bone marrow precursor cells from FcgR1 KO mice (Taconic, Model 584) were obtained by flushing tibial and femoral marrow cells with cold PBS. After one wash with PBS, erythrocytes were lysed using ACK Lysing Buffer (Lonza), washed twice with PBS and suspended at 0.5×10⁶ cells/ml in complete RPMI media (10% FCS, Pen/Strep, Gln, neAA) with the indicated amount of M-CSF (Peprotech) to produce macrophages. To analyze cell viability of bone marrow-derived macrophages, cells were prepared as above and plated at 2.5×10⁴/200 μl in a 96-well plate with suboptimal amounts of M-CSF (10 ng/mil in non-tissue culture treated plates for two days. Cells were then quantified using the ToxGlo™ kit (Promega) and luminescence was determined as a measure of cell viability. All experiments were conducted in the presence or absence of anti-TREM2 antibodies or isotype control antibodies.

[0643] As shown in FIG. 12B, crosslinking the TREM2 receptor with plate-bound anti-TREM2 antibodies 7E5, 2F6, 3A7, and 8F8 increased the number of macrophages that are metabolically active in suboptimal culture conditions. In fact, incubation with plate-bound anti-TREM2 antibodies 7E5, 2F6, 3A7, and 8F8 increased cell viability by ˜50%, as compared the isotype control (mIgG1) and compared to non-treated macrophages (dotted line).

[0644] In Vivo Cell Survival

[0645] To evaluate the ability of anti-TREM2 antibodies to increase the number of immune cells in vivo, C57B16 mice were injected intraperitoneally (IP) with anti-TREM2 antibody 7E5 or a mouse IgG1 isotype control antibody, and the number of immune cells in the brain was then quantified by FACS.

[0646] Three to four mice per group received an IP injection of 40 mg/kg anti-TREM2 antibody 7E5 or isotype control antibody mIgG1 (clone MOPC-21, Bioxcell). 48 hours later, the entire brains were harvested, rinsed with PBS, incubated at 37° C. in PBS containing 1 mg/ml collagenase and processed through a cell strainer to obtain a single cell suspension. Cells were then incubated with anti-CD45-PerCp-Cy7, anti-CD11b-PerCP-Cy5.5, anti-Grl-FITC antibodies and a cell viability dye (Life Technologies, Cat# L34957) for 30 min on ice, then washed twice with cold FACS buffer. 4% PFA-fixed samples were then analyzed by FACS. Data were acquired on a BD FACSCanto™ II cytometer (Becton Dickinson) and analyzed with FlowJo software.

[0647] As shown in FIG. 12C, treatment with anti-TREM2 antibody 7E5 increased the number of immune cells that co-express the markers CD11b and Grl in the brain or blood vessels associated with the brain, as compared to treatment with the isotype control antibody. Treatment with anti-TREM2 antibody 7E5 alone induced the recruitment, on average, of 50% as many CD11b+Gr1+ cells (−6,000), as compared the isotype control or untreated cells (−4000 cells). Cells of the monocyte/macrophage lineage were defined as being positive for the surface markers CD11b and Grl.

### Example 12: Summary of TREM2 Agonistic Antibodies that Induce Gene Expression or Enhance Gene Expression Induced by Natural Ligands or by Binding to Natural Ligands

[0648] Tables 9A and 9B summarize results of the functional studies described in Examples 3-11 above. Anti-TREM2 antibodies demonstrated agonistic or antagonistic activity, either in solution or following antibody clustering (i.e., by plate binding), in modulating TREM2-dependent gene expression in cells expressing human TREM2 (Table 9A) or mouse TREM2 (Table 9B), as measured by a luciferase reporter gene or by modulating the strength of binding to TREM2. As indicated in Tables 9A and 9B, a subset of TREM2 antibodies displays agonistic activity when plate-bound. Another subset of TREM2 antibodies displays agonistic activity when in solution. A third subset of TREM2 antibodies displays antagonistic effects of soluble non-cross-linked antibodies. Certain anti-TREM2 antibodies increased binding of recombinant TREM2 protein to ligands (e.g., APOE3), while other anti-TREM2 antibodies decreased binding of recombinant TREM2 protein to ligands (e.g., APOE3).

[0649] In Table 9A, “Media” refers to a culture media only control, “mIgG1” refers to mouse IgG1 isotype control antibody, “mIgG2a” refers to mouse IgG2a isotype control antibody, “mIgG2b” refers to mouse IgG2b isotype control antibody, “rIgG1” refers to rat IgG1 isotype control antibody, “RIgG2a” refers to rat IgG2a isotype control antibody, “RIgG2b” refers to rat IgG2b isotype control antibody, “P+I” refers to a PMA/Ionomycin control, and “ND” refers to not determined.

TABLE 9A
TREM2 antibody functional studies with human TREM2

| | BWZhT2 LUC | | BWZhT2 LUC | BWZhT2 | |
|---|---|---|---|---|---|
| | Plate-bound | BWZhT2 LUC | Solution + PS | LUC Solution + | Percent human |
| Antibody | (FOB) | Solution (FOB) | (Δ Bmax) | PS (EC₅₀) | APOE3 binding |
| 1A7 | 3.36 | 0.96 | ND | ND | ND |
| 3A2 | 1.07 | 0.32 | ND | ND | ND |
| 3B10 | 5.80 | 0.89 | 1661 | 10.85 | ND |
| 6G12 | 2.11 | 0.30 | ND | ND | ND |
| 6H6 | 2.37 | 0.29 | ND | ND | ND |
| 7A9 | 2.01 | 0.86 | ND | ND | ND |
| 7B3 | 2.38 | 1.19 | 1645 | 4.41 | 64.3 |
| 8A1 | 5.46 | 0.35 | ND | ND | ND |
| 8E10 | 0.00 | 0.34 | ND | ND | ND |
| 8F11 | 1.62 | 0.26 | ND | ND | ND |
| 8F8 | 7.17 | 1.28 | 2235 | 10.27 | 79.7 |
| 9F5 | 2.48 | 1.75 | 2930 | 14.73 | 143.7 |
| 9G1 | 1.59 | 1.07 | 2657 | 5.82 | ND |
| 9G3 | 3.11 | 0.43 | 1258 | 7.82 | 16.4 |
| 10A9 | 2.18 | 0.31 | ND | ND | ND |
| 10C1 | 1.70 | 0.30 | ND | ND | ND |
| 11A8 | 6.01 | 0.79 | 957 | 8.45 | ND |
| 12E2 | 1.87 | 0.86 | ND | ND | ND |
| 12F9 | 9.29 | 2.04 | 1685 | 9.42 | ND |
| 12G6 | 2.70 | 0.90 | ND | ND | ND |
| 2C7 | 1.29 | 1.52 | ND | ND | ND |
| 2F5 | 0.92 | 1.61 | ND | ND | ND |
| 3C1 | 3.65 | 2.68 | ND | ND | ND |
| 4D7 | 5.72 | 2.22 | ND | ND | ND |
| 4D11 | 6.51 | 4.28 | −17661 | 8.7 | ND |
| 6C11 | 1.26 | 3.71 | ND | ND | ND |
| 6G12 | 1.20 | 1.14 | ND | ND | ND |
| 7A3 | 2.36 | 0.76 | ND | ND | ND |
| 7C5 | 5.95 | 4.00 | −34579 | 2.16 | ND |
| 7E9 | 5.17 | 2.19 | 25547 | 26.8 | ND |
| 7F6 | 4.24 | 3.45 | 133 | 3.85 | ND |
| 7G1 | 1.37 | 2.45 | ND | ND | ND |
| 7H1 | 2.70 | 1.96 | ND | ND | ND |
| 8C3 | 6.04 | 2.35 | −42068 | 2.24 | ND |
| 8F10 | 1.81 | 1.28 | ND | ND | ND |
| 12A1 | 1.61 | 0.80 | ND | ND | ND |
| 1E9 | 5.4 | 1.2 | −435 | 4.63 | ND |
| 2C5 | 5.6 | 1.2 | −4695 | 5.85 | ND |
| 3C5 | 5.6 | 1.3 | −888 | 6.44 | ND |
| 4C12 | 5.5 | 1.3 | 49 | 5.66 | ND |
| 4F2 | 4.2 | 1.3 | −4720 | 4.78 | ND |
| 5A2 | 3.2 | 3.1 | −47304 | 1.6 | ND |
| 6B3 | 1.8 | 0.7 | ND | ND | ND |
| 7D1 | 2.5 | 2.9 | −36088 | 1.8 | ND |
| 7D9 | 3.6 | 1.2 | −2853 | 5.55 | ND |
| 11D8 | 5.2 | 1.2 | ND | ND | ND |
| 8A12 | 1.3 | 1.1 | ND | ND | ND |
| 10E7 | 0.8 | 1.4 | ND | ND | ND |
| 10B11 | 5.1 | 1.0 | ND | ND | ND |
| 10D2 | 0.8 | 0.4 | ND | ND | ND |
| 7D5 | 1.1 | 1.0 | ND | ND | ND |
| 2A7 | 1.6 | 3.4 | ND | ND | ND |
| 3G12 | 1.1 | 1.4 | ND | ND | ND |
| 6H9 | 1.1 | 3.2 | ND | ND | ND |
| 8G9 | 1.7 | 2.9 | ND | ND | ND |
| 9B4 | 1.2 | 2.8 | ND | ND | ND |
| 10A1 | 1.3 | 1.4 | ND | ND | ND |
| 11A8 | 1.0 | 1.4 | ND | ND | ND |
| 12F3 | 0.9 | 1.3 | ND | ND | ND |
| 2F8 | ND | ND | ND | ND | ND |
| 10E3 | ND | ND | ND | ND | ND |
| 1B4 | 3.5 | 1.5 | ND | ND | ND |
| 6H2 | 1.1 | 3.6 | −40202 | 3.0 | ND |
| 7B11 | 5.5 | 1.2 | ND | ND | ND |
| 18D8 | 1.4 | 1.3 | ND | ND | ND |
| 18E4 | 1.7 | 1.2 | ND | ND | ND |
| 29F6 | 1.7 | 3.8 | ND | ND | ND |
| 40D5 | 1.9 | 1.4 | ND | ND | ND |
| 43B9 | 1.2 | 1.3 | ND | ND | ND |
| 44A8 | 1.5 | 6.6 | ND | ND | ND |
| 44B4 | 0.8 | 1.4 | ND | ND | ND |
| 45D6 | 2.3 | 1.0 | ND | ND | ND |
| 29F7 | 1.5 | 1.2 | ND | ND | ND |
| 32G1 | 1.0 | 1.1 | ND | ND | ND |
| Media | ND | ND | 0.00 | 5.04 | ND |
| mIgG1 | 0.9 | 1.3 | −383.67 | 6.59 | ND |
| mIgG2a | 1.0 | 1.4 | −1650.00 | 3.57 | ND |
| mIgG2b | 0.9 | 1.4 | −98.00 | 4.18 | ND |
| P + I | 26.5 | ND | ND | ND | ND |
| R IgG1 | 1.0 | 1.2 | ND | ND | ND |
| R IgG2a | 0.8 | 1.2 | ND | ND | ND |
| R IgG2b | 0.8 | 1.3 | ND | ND | ND |

[0650] In Table 9B, “mIgGl” and “rIgG2b” refer to isotype control antibodies, “NT” refers to not treated control, “RDT2” refers to commercial anti-TREM2 antibody from R&D (R&D Cat#F7E57291), “PMA” refers to PMA-only positive control, “ND” refers to not determined, and “BMMAc Killing Solution” refers to decreased bone marrow-derived macrophage cell viability (due to increased macrophage killing)

TABLE 9B
TREM2 antibody functional studies with mouse TREM2

| | BWZmT | | BWZmT | | | | | |
|---|---|---|---|---|---|---|---|---|
| | 2 LUC | BWZmT | 2 LUC | BWZmT2 | | | | |
| | Plate- | 2 LUC | Solution + | LUC | Percent | | | BMMAc |
| Anti- | bound | Solution | PS (Δ | Solution + | APOE | | pSyk/ | Killing |
| body | (FOB) | (FOB) | Bmax) | PS (EC₅₀) | binding | pSyk | DAP12 | Solution |
| 1H7 | 2.89 | 0.49 | ND | ND | | + | ND | ++ |
| 2F6 | 25.53 | 10.62 | 7900 | 3.94 | 74.34 | ++ | + | − |
| 2H8 | 2.89 | 0.68 | ND | ND | | | | ++ |
| 3A7 | 7.80 | 7.18 | 10248 | 1.98 | 92.28 | ++ | + | - |
| 3B10 | 2.19 | 3.36 | 14 | 12.95 | 79.30 | ++ | + | NT |
| 7E5 | 8.47 | 9.53 | 2274 | 3.084 | 83.76 | + | + | − |
| 7F8 | 5.78 | 0.66 | ND | ND | | + | + | + |
| 8F8 | 33.71 | 1.76 | 1957 | 6.73 | 81.64 | − | ND | − |
| 11H5 | 3.63 | 5.84 | 4240 | 8.023 | 83.68 | + | ND | NT |
| mIgG1 | 1.11 | 3.79 | 819.5 | 13.33 | 90.81 | ND | ND | ND |
| NT | 1 | 1 | 0 | 12.155 | | ND | ND | ND |
| RDT2 | ND | ND | 3103 | 12.07 | 106.47 | ND | ND | ND |
| rIgG2b | ND | ND | −850 | 12.21 | 102.44 | ND | ND | ND |
| PMA | 30.81 | 24.00 | ND | ND | | ND | ND | ND |

### Example 13: Analysis of the Effect of TREM2 Antibodies in Increasing Recruitment of Immune Cells and Induction of Pro-Inflammatory Signals In Vivo

[0651] Recruitment of Immune Cells

[0652] The ability of TREM2 antibodies to modulate the recruitment of inflammatory cells (neutrophil granulocytes, monocytes, and macrophages) in the peritoneal cavity (PEC) of C57B16 mice after intraperitoneal (IP) administration of either antibody alone or in combination with LPS was evaluated. Four mice per group were treated as described in FIG. 13A. Briefly, mice receive first an IP injection of 40 mg/kg anti-TREM2 antibody 7E5, antibody 8F8, or isotype control antibody mIgG1 (clone MOPC-21, Bioxcell). Fourteen hours later, mice received an IP injection of 4 mg/kg LPS, or PBS as a control. Six hours after LPS or PBS injection, cells were harvested from the PEC as described (see, e.g., Gawish R et al, 2014 FASEB J) and analyzed by FACS. For FACS analysis, PEC cells were incubated with anti-CD11b-Pacific Blue, anti-CD11c PeCy7, anti-MCH-II-APCCy7, anti-Grl-FITC, anti-Ly6G-PE and a viability die (Life Technologies, Cat# L34957) for 1 hour on ice, then washed twice with cold FACS buffer. 4% PFA-fixed samples were then acquired. Data were acquired on a BD FACS CANTO II cytometer (Becton Dickinson) and analyzed with FlowJo software.

[0653] As shown in FIGS. 13B and 13C, treatment with anti-TREM2 antibody 7E5 increased the number of neutrophils recruited in the PEC, as compared to treatment with the control antibody. The effect of anti-TREM2 antibody 7E5 on neutrophil recruitment was more pronounced in the presence of LPS, thus indicating that anti-TREM2 antibody 7E5 synergizes with LPS in the recruitment of neutrophils in the PEC. As shown in FIGS. 13D and 13E, treatment with anti-TREM2 antibody 8F8 did not increase the number of neutrophils recruited in the PEC, as compared to treatment with the control antibody. Neutrophils were defined as being positive for the surface markers Ly6G and Gr1.

[0654] As shown in FIG. 13F, 13G, 13 H, and 13I, treatment with anti-TREM2 antibody 7E5 or 8F8 did not increase the number of resident macrophages recruited in the PEC, as compared to treatment with the control antibody. Resident macrophages were defined as being positive for the surface marker CD11b and highly positive for the surface marker F4/80.

[0655] As shown in FIGS. 13J, 13K, 13L, and 13M treatment with anti-TREM2 antibody 7E5 and 8F8 increased the number of small infiltrating macrophages recruited in the PEC, as compared to treatment with the control antibody. The effect of anti-TREM2 antibody 7E5 and 8F8 on small infiltrating macrophage recruitment was not increased in the presence of LPS, indicating that anti-TREM2 antibodies 7E5 and 8F8 alone are sufficient to recruite small infiltrating macrophage in the PEC. Small infiltrating macrophages were defined as being positive for the surface marker CD11b and intermediately positive for the surface marker F4/80. Statistics in FIG. 13A-13M were calculated using Student's T-test, *Pval<0.05, **Pval<0.01, ***Pval<0.001.

[0656] Previous results have demonstrated that anti-TREM2 antibody 7E5 induces agonistic activity in vivo, and that anti-TREM2 antibody 8F8 behaves as a blocking antibody in vivo. The results in FIG. 13A to 13M, indicate that antibody 7E5 induces in vivo neutrophil accumulation in the peritoneum of mice that have been injected with LPS, while antibody 8F8 injection reduces the accumulation of neutrophils (and infiltrating macrophages) during LPS-induced sepsis. The results confirm that antibody 8F8 is a blocking antibody in vivo.

[0657] Induction of Pro-Inflammatory Signals

[0658] The ability of TREM2 antibodies to modulate the production of pro-inflammatory cytokines (CCL4, IL-1β, and MCP-1) in the peritoneal cavity (PEC) of C57B16 mice after intraperitoneal (IP) administration of either antibody alone or in combination with LPS was evaluated. Mice were treated as described in FIG. 13N. Briefly, mice received an IP injection of 40 mg/kg anti-TREM2 antibody 7E5, antibody 8F8, or isotype control antibody mIgG1 (clone MOPC-21, Bioxcell) on day 0. On day 1, mice received an IP injection of 4 mg/kg LPS, or PBS as a control. At 1.5 hours after LPS or PBS injection, the concentration of CCL4, IL-1β, and MCP-1 (CCL2) in serum samples from the mice was measured by cytometric bead assay (CBA).

[0659] As shown in FIGS. 13O to 13Q, anti-TREM2 antibody 7E5 induces enhanced production of CCL4, IL-1β, and MCP-1 in vivo. However, anti-TREM2 antibody 8F8 did not induce an in vivo increase in the production of CCL4, IL-1β, or MCP-1 (FIGS. 13O to 13Q).

### Example 14: TREM2 Antibodies Increase the Level of Soluble TREM2 in Mice

[0660] It is believed that the extracellular portion of TREM2 can be shedded into a soluble form (sTREM2), and thus can be detected in the plasma and cerebrospinal fluid (CSF). It is also believed that in individuals with Alzheimer's disease or frontotemporal dementia the amount of sTREM2 in the CSF is reduced compared to healthy control individuals.

[0661] To determine the amount of anti-TREM2 antibodies present in the blood serum of mice at 2, 4, 8 and 15 days after injection of anti-TREM2 antibody 7E5, a standard ELISA method was utilized. Briefly, ELISA plates coated with 0.1 ug/well recombinant mouse TREM2 protein at 100 uL/well in carbonate coating buffer (pH 9.6) overnight at 4° C. Plates were then washed and blocked with 3% skim milk powder in PBS for 1 hour at room temperature and then washed. Mouse blood serum samples were titrated in PBS-Tween, added to the plate at 100 uL/well, and incubated for 1 hour at 37° C. with shaking. Anti-TREM2 antibodies were detected using a Goat anti-mouse IgG1-HRP secondary and developed with TMB substrate. A defined amount of anti-TREM2 antibody 7E5 was spiked in the blood serum of a naïve mouse and titrated to obtain a calibration curve. The results are depicted in FIG. 14, and indicate that the half-life of antibody 7E5 in the serum of mice is approximately 9.3 days.

[0662] To determine the effect of anti-TREM2 antibodies on blood serum levels of sTREM2 in mice, the amount of sTREM2 present in blood samples from mice was measured at 2, 4, 8 and 15 days after the injection of soluble anti-TREM2 antibody 7E5. Serum levels of sTREM2 were measured using a standard ELISA method. Briefly, Immulon ELISA 96-well plates were coated overnight at 4° C. with 100 μI of capture anti-TREM2 antibody (ADI-9) at 2 μg/ml. The next morning plates were washed three times with 200 μl wash buffer (PBS+0.05% Tween-20). Then plates were blocked by addition of 300 μl binding buffer (PBS+1% BSA) for 1 hr at room temperature on orbital shaker. Subsequently serum samples (1:12 dilution) and standards (recombinant mouse TREM2, R&D Systems) were added in 100 μl binding buffer, and plates were incubated at room temperature for 1 hr. Then plates were washed three times with 200 μl wash buffer. The detection biotinylated rat anti-TREM2 (R&D Systems, biotinylated with micro-NHS-Peg4-Biotinylation kit from Life Technologies Pierce) was added at 1:10,000 in 100 μl binding buffer and incubated for 1h at room temperature on orbital shaker. Then plates were washed three times with 200 μl wash buffer. 100 μl Streptavidin-HRP (R&D Systems) at 1:200 in binding buffer was added to the plates and incubated for 20 min on orbital shaker. Then plates were washed three times with 200 μl wash buffer and 100 μl TMB substrate (Life Technologies Pierce) was added and incubated on plate shaker until color developed. The reaction was stopped by addition of 50 μl sulfuric acid, and color was quantified using a Biotek Synergy H1 plate reader.

[0663] As shown in FIG. 15, the anti-TREM2 antibody 7E5 increases the serum half-life of sTREM2 in mice in a dose dependent manner. This increase in serum levels can serve as a biomarker for the biological activity of TREM2 antibodies.

### Example 15: TREM2 Antibodies Decrease Cell Surface Levels of TREM2

[0664] It is believed that antibodies that target certain ITIM/ITAM receptors expressed on the surface of immune cells can reduce the surface levels of the receptor on monocytes, macrophages, dendritic cells, and/or microglia.

[0665] The ability of anti-TREM2 antibodies to reduce cell surface expression of TREM2 on mouse primary bone marrow derived macrophages (BMDM) was evaluated. BMDM were cultured in 96-well tissue culture plates that were pre-coated with increasing concentrations of phosphatidylserine (PS) or sphingomyelin (SM), which are believed to be natural ligands of TREM2. Either a Syk inhibitor (R408) or 10 ug/ml of soluble anti-TREM2 antibodies or isotype control antibodies were added. 24 hours later, BMDM were analyzed by FACS for TREM2 expression on the cell surface. TREM2 expression was detected using a commercial anti-TREM2 antibody (R&D Cat#F7E57291).

[0666] As shown in FIG. 16A, both TREM2 ligands PS and SM were able to decrease cell surface levels of TREM2 in a dose-dependent manner. Cell surface levels of TREM2 were reduced by ˜75% at the most effective PS dose (FIG. 16A). The effect of SM was less pronounced than PS. The maximal reduction of cell surface levels of TREM2 obtained with SM was ˜30% (FIG. 16A).

[0667] FIG. 16B demonstrates that treatment with soluble anti-TREM2 antibodies 3A7 or 2F6 alone decreased cell surface levels of TREM2 by ˜58%, which was similar to the reduction seen with the TREM2 ligands. R408 is a SYK inhibitor, which also decreases TREM2 cell surface levels. The results indicate that both activation of TREM2 signaling by lipid binding and inhibition induced by a signaling (SYK) inhibitor decrease cell surface levels of TREM2. Similarly, TREM2 antibodies 3A7 and 2F6 also decrease TREM2 cell surface levels.

### Example 16: Analysis of the Effect of Anti-TREM2 Antibodies in Mouse Models of Alzheimer's Disease

[0668] Mouse Models of Alzheimer's Disease

[0669] APP/PS1 mice contain human transgenes for both APP and PSEN1. The APP human transgene contains the Swedish mutation (K670N, M671L) and the PSEN1 human transgene contains an L166P mutation. Both transgene are under the control of the Thy1 promoter.

[0670] 5XFAD mice overexpress mutant human APP (695) with the Swedish (K670N, M671L), Florida (1716V), and London (V717I) familial Alzheimer's disease (FAD) mutations. 5XFAD mice also overexpress human PS1 harboring two FAD mutations, M146L and L286V. Both transgenes are under the control of the mouse Thyl promoter to drive over expression in the brain and recapitulate major features of Alzheimer's disease.

[0671] Tg2576 mice overexpress a mutant form of APP (isoform 695) bearing the Swedish mutation (KM670/671NL).

[0672] For intracranial injections into 4-month old APP/PS1 or 5-month old 5xFAD mice, five mice per group received an injection of 2 ul of a 1 or 5 mg/ml solution of anti-TREM2 antibody 7E5 or isotype control antibody mIgG1 (clone MOPC-21, Bioxcell) as described (Wilcock D M, et al., (2003) J Neurosci 23:3745; Wilcock D M, et al., (2004) Neurobiol Dis 15:11; Sudduth et al., (2013) J. Neurosci, 33, 9684. On the day of surgery, mice were weighed, anesthetized with isoflurane, and placed in a stereotaxic apparatus (51733D digital dual manipulator mouse stereotaxic frame; Stoelting). A mid-sagittal incision was made to expose the cranium and four burr holes were drilled with a dental drill mounted in the stereotaxic frame over the frontal cortex and hippocampus to the following coordinates: frontal cortex, anteroposterior, +1.7 mm, lateral ±2.0 mm; hippocampus, anteroposterior −2.7 mm; lateral, ±2.5 mm, all taken from bregma. A 26 gauge needle attached to a 10 ml Hamilton syringe (Hamilton) containing the solution to be injected was lowered 3.0 mm ventral to bregma, and a 2 μl injection was made over a 2 min period. The incision was cleaned and closed with surgical staples. Three days post-injection, mice were perfused with saline and the right hemisphere of the brains was dissected into frontal cortex, hippocampus, rest of brain, and flash frozen. The left half was immersion fixed in freshly prepared 4% paraformaldehyde.

[0673] For systemic treatment of 3-month old wild-type (WT) or 5xFAD transgenic mice, animals were injected intraperitoneally weekly for 16 weeks with 50 mg/kg 7E5 antibody or mouse IgG1 isotype control antibody. At the end of the experiment, mice were perfused with normal saline and whole brains were extracted. The left hemibrain was drop fixed in 4% paraformaldehyde for 24h, followed by immunohistochemistry. The right hemibrains were dissected into frontal cortex, posterior cortex, hippocampus and cerebellum and flash frozen in liquid nitrogen.

[0674] Analysis of Cytokine and Chemokine Expression after Anti-TREM2 Antibody Treatment in the Brain In Vivo

[0675] The ability of anti-TREM2 antibodies to modulate the expression of inflammatory genes in different regions of the brain of APP/PS1 mice and 5XFAD mice was evaluated after intracranial (IC) administration of anti-TREM2 antibodies.

[0676] RNA was extracted from left hippocampus using the Trizol Plus RNA Purification System (Ambion, Invitrogen) according to the manufacturer's instructions. RNA was quantified using the BioSpec Nano spectrophotometer (Shimadzu) and cDNA was reverse transcribed using the cDNA High Capacity kit (Applied Biosystems) according to the manufacturer's instructions. Real-time PCR was performed using the 384-well microfluidic card custom TaqMan® assays containing TaqMan® gene expression probes for genes of interest IL-1b, IL-6, TNFa, IL-12, YM-1, IL-1Ra, MRC1, IL-10, CD86, FCGR1B, CCL2, CCL3, CCR2, CXCL10, Gata3, Rorc, OPN, FLT1, CSF-1, MHC-II, AXL and TGFb (Applied Biosystems, Invitrogen). All gene expression data was normalized to 18S rRNA expression. Fold change was determined using ACT-method. Data are presented as mean±SEM. Statistical analysis is performed using the JMP statistical analysis program (SAS). Statistical significance was assigned where the p value was lower than 0.05. One-way ANOVA and two-way ANOVA were used, where appropriate, to detect treatment differences and differences within treatment groups along the time course.

[0677] As shown in FIG. 17A, treatment of APP/PS1 mice with anti-TREM2 antibody 7E5 significantly increased the expression of IL-lb, IL-6, TNFa, and CD86 by approximately 2-fold. The expression of FCGR1B was increased approximately 3-fold, and the expression of IL-10 was increased approximately 4-fold. By contrast, expression of the IL-1Ra decreased by half. Expression of IL-12, YM-1, MRC1, and TGFB remained unchanged.

[0678] As shown in FIG. 17B, intracranial injection of 5XFAD mice with anti-TREM2 antibody 7E5 significantly increased the expression of IL-lb, TNFa, YM-1, CD86, CCL2, CCL3, CCR2, CXCL10, Gata3 and Rorc by approximately 2-fold 72 hours post injection. The expression of CCLS was increased approximately 3-fold. Expression of TGF-β1 remained unchanged. As shown in FIG. 17C, FLT1 levels were increased upon 7E5 injection. The expression of pro-inflammatory and anti-inflammatory genes in the hippocampus of 5XFAD mice 24 and 72 hours after injection with antibody 7E5 was measured using TaqMan assays containing TaqMan® gene expression probes for IL-1b, TNFa, YM-1, IL1Rn CD86, TGF-β1, CCL2, CCL3, CCL5, CCR2, CXCL10, Gata3, FLT1 and Rorc (Applied Biosystems, Invitrogen), and real-time PCR.

[0679] Three month long weekly injections of antibody 7E5 into 5xFAD mice decreased the level of CD11c, while increasing levels of Fabp3 (FIG. 17D-17P). In contrast, levels of CCL2, CXCL10, Rorc, Fabp5 and TNFa were increased. The results indicate that antibody 7E5 modulates inflammatory signaling and may thereby elicit a therapeutic benefit (FIG. 17D-17P).

[0680] Amyloid Beta Peptide Accumulation

[0681] The ability of anti-TREM2 antibodies to reduce the amount of amyloid beta (Abeta) peptide in different regions of the brain was evaluated after either intracranial (IC) administration of anti-TREM2 antibody into APP/PS1 mice or after intraperitoneal administration of anti-TREM2 antibody 7E5 into 5xFAD mice as described above. For the quantification of Abeta peptide, the paraformaldehyde fixed left hemibrain was passed through a series of 10, 20, and 30% sucrose solutions as cryoprotection and 25 μm frozen horizontal sections were collected using a sliding microtome and stored floating in PBS containing sodium azide at 4° C. Sections spaced 300 μm spanning the estimated injection site were initially mounted and stained by cresyl violet to identify the injection site. For all subsequent histology and immunohistochemistry six sections spanning the injection site, spaced 100 μm apart were selected and analyzed. Free-floating immunohistochemistry for Abeta (rabbit polyclonal antibody Aβ1-16; Invitrogen) was performed. The percent area occupied by positive stain was calculated using Nikon elements BR software.

[0682] To measure Abeta peptide levels in protein lysates, protein was extracted from the right frontal cortex using a two-step extraction method. First, the brain was homogenized in PBS containing a complete protease and phosphatase inhibitor (Pierce Biotechnology). These samples were centrifuged at 16,000×g at 4° C. for 1 h. The supernatant was removed and became the “soluble” extract. The resulting pellet was homogenized in 100 μl of 70% formic acid and centrifuged at 16,000×g at 4° C. for 1 h. The supernatant was removed and neutralized 1:20 with 1 M Tris-HCl and became the “insoluble” extract. Protein concentration for both the soluble and insoluble extracts was determined using the bicinchoninic acid protein assay according to manufacturer's instructions (Thermo Scientific). Meso-Scale Discovery multiplex ELISA system was used to measure Abeta 38 (A1338), Abeta 40 (A1340), and Abeta 42 (A(342) (MSD). ELISA kits were run according to the manufacturer's instructions.

[0683] As shown in FIG. 17Q, treatment with anti-TREM2 antibody 7E5 significantly decreased the area of the brain that stained positive for the Abeta peptide. In the frontal cortex Abeta peptide covered approximately 4% of the tissue in mice treated with control antibody, as compared to approximately 2% of the tissue in mice that were treated with anti-TREM2 antibody 7E5. In the hippocampus Abeta peptide covered approximately 3% of the tissue in mice treated with control antibody, as compared to approximately 2% of the tissue in mice treated with anti-TREM2 antibody 7E5.

[0684] As shown in FIG. 17R, injection of 5xFAD mice with the anti-TREM2 antibody 7E5 significantly decreased the area of the brain that stained positive for the Abeta peptide. In the frontal cortex Abeta peptide covered approximately 20% of the tissue in mice treated with control antibody, as compared to approximately 12.5% of the tissue in mice that were treated with anti-TREM2 antibody 7E5. In the hippocampus Abeta peptide covered around approximately 12% of the tissue in mice treated with control antibody, as compared to approximately 7.5% of the tissue in mice treated with anti-TREM2 antibody 7E5.

[0685] As shown in FIG. 17S-17U, injection of 5XFAD mice with the anti-TREM2 antibody 7E5 significantly decreased the levels of Abeta42, but not Abeta30, peptide in the insoluble protein lysates. There was a small, but not significant decrease of Abeta40 peptide. FIG. 17S shows levels of Abeta38 peptide. FIG. 17T shows levels of Abeta40 peptide. FIG. 17U shows levels of Abeta42 peptide.

[0686] Microglia Immunostaining

[0687] The ability of anti-TREM2 antibodies to modulate the number, morphology, and activation status of microglia in different regions of the brain in APP/PS1 mice intracranial injected with anti-TREM2 antibody or 5xFAD mice peripherally injected weekly for three months with the anti-TREM2 antibody 7E5 was evaluated after treatment with anti-TREM2 antibody. Mice were treated as described above, perfused, and brain samples were processed for histology. Six sections spanning the injection site, spaced 100 μm apart were selected and analyzed. Sections were incubated in primary anti-CD11b antibody, 1:3,000 (Rat monoclonal, AbD Serotec, Raleigh, N.C.) in 4% goat serum in DPBS left at room temperature and then overnight at 4° C. Sections were then incubated in biotinylated secondary antibody for 2 hours. Goat anti-rabbit IgG was used for GFAP and goat anti-rat for CD11b, both at 1:3,000 (Vector Laboratories, Burlingame, Calif.). Amplification of the secondary antibody signal was achieved through incubation in advidin-biotin complex (ABC) (Vector Laboratories, Burlingame, Calif.) for 1 hour. For color development, the vector diaminobenzidine (DAB) peroxidase kit (Vector Laboratories, Burlingame, Calif.) was used according to the manufacturer's instructions. Sections were mounted onto slides, left to air-dry overnight, dehydrated in an ethanol gradient followed by xylene incubations, and cover-slipped using DPX mountant (Electron Microscopy Sciences, Hatfield, Pa.). The percent area occupied by positive stain was calculated using Nikon elements BR software.

[0688] As shown in FIG. 17V, IC injection with anti-TREM2 antibody 7E5 in APPPS1 mice significantly decreased the area of the brain that stained positive for CD11b. In the frontal cortex, CD11b positive cells occupied approximately 10% of the tissue in mice that were treated with control antibody, as compared to approximately 22% in mice that were treated with anti-TREM2 antibody 7E5. In the hippocampus, CD11b⁺ cells occupied approximately 14% of the tissue in mice that were treated with control antibody, as compared to approximately 22% of the tissue in mice that were treated with anti-TREM2 antibody 7E5.

[0689] As shown in FIG. 17W, systemic treatment of 5XFAD mice with anti-TREM2 antibody 7E5 significantly increased the area of the brain that stained positive for CD11b. In the frontal cortex, CD11b positive cells occupied approximately 12% of the tissue when mice were treated with control antibody, as compared to approximately 23% of the tissue when mice that were treated with anti-TREM2 antibody 7E5. In the hippocampus, CD11b+ cells occupied approximately 18% of the tissue when mice were treated with control antibody, as compared to approximately 32% of the tissue when mice were treated with anti-TREM2 antibody 7E5.

[0690] Cognitive and Motor Function Determination

[0691] To evaluate the ability of anti-TREM2 antibodies to delay, prevent, or reverse the cognitive deficits of Alzheimer's disease (AD), 5XFAD mice were used. The 5XFAD mice were treated weekly with 50 mg/kg anti-TREM2 antibody 7E5 or with isotype control antibody mIgG1 (clone MOPC-21, Bioxcell) for 12 weeks. At the end of treatment, mice were tested for reduction in cognitive deficits using the radial arm water maze and the novel object recognition test.

[0692] Radial Arm Water Maze

[0693] The radial arm water maze is a spatial learning and memory task, as described in Wilcock et al., (2006) The Journal of Neuroscience, 26:5340. Briefly, after 12 weeks of antibody treatment, the 5XFAD mice were subjected to a 2 d radial arm water maze paradigm, followed by 1 d of an open-pool visible platform task. The apparatus was a six-arm maze as described previously in Gordon et al., (2001). Neurobiol Aging 22:377. The radial arm water maze task was run as described previously in Wilcock et al., (2004). J Neuroinflammation 1:24. On day 1, 15 trials were run in three blocks of five. Mice were further run in cohorts of four mice, permitting a short rest between each trial (as the other three mice were run) and a longer break between the blocks, when another cohort of four mice were run. This permitted rapid testing of aged mice without development of fatigue. Moreover, the spaced practice of the trials appears to enhance the rate of acquisition compared with daily massed trials over 10-14 d. The start arm was varied for each trial, with the goal arm remaining constant for both days. For the first 11 trials, the platform was alternately visible and then hidden and remained hidden for the last four trials. On day 2, the mice were run in exactly the same manner as day 1, except that the platform was hidden for all trials. The numbers of errors (incorrect arm entries) were measured in each trial over a 1 min time frame. To avoid confounds caused by inactive mice, one error is assigned for every 20 s a mouse failed to make an arm selection. Each mouse's errors for three consecutive trials were averaged, producing five blocks of trials for each day. Trial blocks were analyzed statistically by ANOVA using StatView (SAS Institute, Cary, N.C.). After the 2 d of radial arm water maze, the mice received 15 trials in an open-pool task with a visible platform to identify whether poor scores in the radial arm maze could be attributed to sensory or performance deficits rather than memory impairment. In the current study, all mice performed well on the visible platform version of the maze, and none were excluded because of sensory or performance deficits.

[0694] As shown in FIG. 17X, treatment with anti-TREM2 antibody 7E5 significantly improved special learning and memory deficits in 5XFAD mice. hi the last blocks (9-10) 5xFAD mice averaged 3 errors when treated with control antibody, as compared to less than 1 error when treated with the anti-TREM2 antibody 7E5 (FIG. 17X).

[0695] Novel Object Recognition Test

[0696] The novel object recognition test (NORT) is a sensitive and reproducible test for measuring cognitive abnormalities in mouse models of Alzheimer's disease. 5XFAD mice were placed for a 1-hour habituation period in an open glass aquarium-like transparent box, each at a time, in a sound-isolated room. On the following day they were reintroduced in the box for 5 min with two identical clean plaster objects, placed in two different corners of the box to measure baseline activity. Four hours later, one of the objects was replaced with a new one of the same size and texture, and the mice were reintroduced for an additional 5 min into the same cage to test for novel object recognition. The time spent by the mouse in object exploration was recorded manually by an operator blinded to the different treatments. The cumulative time spent at each of the objects was recorded. Exploration of an object was defined as directing the nose to the object at a distance of 2 cm and/or touching it with the nose. The percentage of the total time that the animal spent investigating the new object out of total exploration time was the measure of recognition memory. At baseline, the mouse spent approximately an equal time at each of the two objects, since both are novel to the mouse. At test, the cognitively healthy mice identify the new object as “new”, remembering the old one, and therefore spend more time exploring the new object (˜70-75% of the time).

[0697] Alzheimer's disease develops in 5xFAD mice over time leading to impaired memory, thus shorter (than normal) percent of the time exploring the new object. Significance for NORT was tested using two-way ANOVA for repeated measures, and post hoc Fisher's PLSD test. Data are expressed as mean±s.e.m.

[0698] As shown in FIG. 17Y, an improvement in cognitive function was observed in 5XFAD mice that were treated with anti-TREM2 antibody 7E5. The 5XFAD mice that were treated with the control antibody spent only approximately 50% of the time exploring the novel object, which is indicative of highly unpaired cognitive function. By contrast, mice treated with the anti-TREM2 antibody 7E5 spent 67% of the time exploring the novel object, which is close to the normal cognitive function measured in wild-type (WT) mice, indicating almost full recovery. Post hoc Fisher's PLSD test was used for statistical analysis **=Pval<0.01.

[0699] Tg2576 Mouse Alzheimer's Disease Model

[0700] To evaluate the ability of anti-TREM2 antibodies to delay, prevent, or reverse the development of Alzheimer's disease (AD), Tg2576 mice are used. Tg2576 mice overexpress a mutant form of APP (isoform 695) bearing the Swedish mutation (KM670/671NL). Mice are treated weekly with 50 mg/Kg anti-TREM2 antibody 7E5 or with isotype control antibody mIgG1 (clone MOPC-21, Bioxcell) starting from 98-99 weeks of age. Mice are tested for Abeta plaque load with immunohistochemistry and by ELISA of tissue extracts. Mice are further tested for the number of microglia in the brain, and for reduction in cognitive deficit using Morris Water maze, a spatial learning and memory task, Radial Arm Water Maze, a spatial learning and memory task, Y Maze (quantifies spontaneous alternation as a measure of spatial cognition), novelty preference in in an open field, operant learning to assess learning and memory, and fear conditioning (mousebiology.org website; Wang et al., (2015) Cell. pii: S0092-8674(15)00127-0).

### Example 17: TREM2 Expression in the Tumor Microenvironment

[0701] Groups of 3 C57B16 or BALB/c mice (females, 8 weeks old) were challenged subcutaneously with 1×10⁶ MC38 or CT26 colon carcinoma cells, or EMT-6 murine mammary carcinoma cells, suspended in 100 ul PBS. Animals are anesthetized with isoflurane prior to implant. When the tumors reached a size of 700-1000 mm³, tumors were explanted to analyze TREM2 expression in the tumor microenvironment by FACS. As a comparison, the spleen of the tumor baring mice or control spleen of naïve mice were also analyzed. For expression analysis by FACS, tumor and spleens were incubated in PBS containing lmg/ml collagenase and then processed through a cell strained to obtain a single cell suspension. Cells were then incubated with anti-CD45-PerCp-Cy7, anti-CD11b-PerCP-Cy5.5, anti-CD3-PC, anti-Grl-FITC, anti-NK1.1-PE, anti-TREM2-APC antibodies and a viability die (Life Technologies, Cat# L34957) for 30 min on ice, then washed twice with cold FACS buffer. 4% PFA-fixed samples were then acquired. Data were acquired on a BD FACS CANTO II cytometer (Becton Dickinson) and analyzed with FlowJo software.

[0702] As shown in FIG. 18, TREM2 was found expressed on the cell surface in ˜5-20% of CD45+CD3-CD11b+Gr1-myeloid cells (which include macrophages, monocytes, and dendritic cells) and in ˜5-20% of CD45+CD3-CD11b+Gr1+ myeloid derived suppressor cells (MDSC) that infiltrate MC38, CT26 and EMT6 tumors. TREM2 was not found expressed in the spleen of tumor bearing mice or naïve mice. These results indicate that MC38, CT26, and EMT-6 tumors stimulate cell surface expression of TREM2 in a subset of myeloid cells.

### Example 18: Analysis of Tumor Growth in TREM2-Deficient Mice

[0703] Groups of TREM2 wild-type (WT, n=11) and TREM2 knock-out (KO, n=14) mice (sex and age-matched littermates, 10+/−2 weeks old) were challenged subcutaneously with 1×10⁶ MC38 colon carcinoma tumor cells suspended in 100 ul PBS. Mice were anesthetized with isoflurane prior to implant. Tumor growth was monitored with a caliper biweekly to measure tumor growth starting at day 5. The endpoint of the experiment is a tumor volume of 2000 mm³ or 60 days. Tumor size over time (expressed as volume, mm³) is the outcome measure.

[0704] FIG. 19A shows that the average tumor size is significantly smaller in TREM2 knock-out (KO) mice, as compared to wild-type (WT) mice, at an early time point after tumor injection (day 8), while the difference in tumor size becomes no longer statistically significant at later time points (day 26). Median tumor growth was reduced in TREM2 knock-out (KO) mice, as compared wild-type (WT) mice (FIG. 19B). These results suggest that TREM2 promotes tumor growth, and is particularly prominent in the early phases of tumor progression.

### Example 19: Analysis of the Anti-Cancer Effect of TREM2 Antibodies in a Mouse Model of Breast Cancer

[0705] Groups of 10 BALB/c mice at 8 weeks (+/−2 weeks) of age are challenged subcutaneously with 5×10⁶ EMT-6 tumor cells suspended in 100 ul PBS. Animals are anesthetized with isoflurane prior to implant. Starting at day 2, groups of mice are injected IP at day 1, 4, 8, 15, and 22 with 40 mg/kg of anti-TREM2 antibodies. Tumor growth is monitored with a caliper biweekly to measure tumor growth starting at day 4. The endpoint of the experiment is a tumor volume of 2000 mm³ or 60 days. Tumor growth and % survival are the outcome measures. Reduced tumor take and growth rate, reduced number of tumor infiltrating immune suppressor macrophages, and increased effector T cell influx into the tumor indicate the anti-cancer effects of blocking anti-TREM2 antibodies.

### Example 20: Analysis of Additive Anti-Tumor Effect of Combination Therapy that Combines TREM2 Antibodies with Antibodies Against Inhibitory Checkpoint Proteins or Inhibitory Cytokines/Chemokines and their Receptors in a Mouse Model of Breast Cancer

[0706] Groups of 10 BALB/c mice at 8 weeks (+/−2 weeks) of age are challenged subcutaneously with 5×10⁶ EMT-6 tumor cells suspended in 100 ul PBS. Animals are anesthetized with isoflurane prior to implant. Starting at day 2, groups of mice are injected IP at day 1, 4, 8, 15, and 22 with 40 mg/kg of anti-TREM2 antibodies alone or in combination with antibodies against checkpoint proteins (e.g., anti-PDL1 mAb clone 10F.9G2 and/or anti-CTLA-4 mAb clone 9H10) at day 8 and 11. Treatment groups include anti-TREM2; anti-CTLA-4; anti-TREM2+anti-CTLA-4 and isotype control. Tumor growth is monitored with a caliper biweekly to measure tumor growth starting at day 4. The endpoint of the experiment is a tumor volume of 2000 mm³ or 60 days. Tumor growth and % survival are the outcome measures. A decrease in tumor growth and an increase in percent survival with combination therapy indicate that anti-TREM2 antibodies have additive or synergistic therapeutic effects with anti-checkpoint antibodies. Antagonistic antibodies against checkpoint molecules include antibodies against PDL1, PDL2, PD1, CTLA-4, B7-H3, B7-H4, HVEM, BTLA, KIR, GALS, TIM3, A2AR, LAG-3, and phosphatidylserine (PS). Antagonist antibodies against inhibitory cytokines include antibodies against CCL2, CSF-1, and IL-2.

### Example 21: Analysis of Additive Anti-Tumor Effect of Combination Therapy that Combines TREM2 Antibodies with Antibodies that Activate Stimulatory Checkpoint Proteins

[0707] Groups of 15 C57B16/NTac mice at 8 weeks (+/−2 weeks) of age are challenged subcutaneously with tumor cells as described in Example 19. Animals are anesthetized with isoflurane prior to implant. Starting at day 2, mice are injected intraperitoneally every 3 days for 4 doses with 200 ug anti-TREM2 antibodies alone or in combination with agonistic antibodies that activate stimulatory checkpoint proteins (e.g., OX40 or ICOS mAb) at day 3, 6, and 9. Tumor growth is monitored with a caliper biweekly to measure tumor growth starting at day 4. The endpoint of the experiment is a tumor volume of 2000 mm³ or 60 days. Tumor growth and percent survival are the outcome measures. A decrease in tumor growth and an increase in percent survival with combination therapy indicate that anti-TREM2 antibodies have additive or synergistic therapeutic effects with stimulatory checkpoint antibodies. Stimulatory checkpoint antibodies include agonistic/stimulatory antibodies against CD28, ICOS, CD137, CD27, CD40, and GITR.

### Example 22: Analysis of Additive Anti-Tumor Effect of Combination Therapy that Combines TREM2 Antibodies with Stimulatory Cytokines

[0708] Groups of 15 C57B16/NTac mice at 8 weeks (+/−2 weeks) of age are challenged subcutaneously with tumor cells as described in Example 19. Animals are anesthetized with isoflurane prior to implant. Starting at day 2, mice are injected intraperitoneally every 3 days for 4 doses with 200 ug anti-TREM2 antibodies alone or in combination with stimulatory cytokines (e.g., IL-12, IFN-a). Tumor growth is monitored with a caliper biweekly to measure tumor growth starting at day 4. The endpoint of the experiment is a tumor volume of 2000 mm³ or 60 days. Tumor growth and percent survival are the outcome measures. A decrease in tumor growth and an increase in percent survival with combination therapy indicate that anti-TREM2 antibodies have additive or synergistic therapeutic effects with immune-stimulatory cytokines. Stimulatory cytokines include IFN-α/b, IL-2, IL-12, IL-18, GM-CSF, and G-CSF.

### Example 23: Characterization of the Therapeutic Use of Agonistic TREM2 and/or TREM2 Bispecific Antibodies in a Model of Inflammatory Diseases

[0709] The therapeutic utility of agonistic anti-TREM2, and/or TREM2 bispecific antibodies is tested in a model of inflammatory diseases. For example rheumatoid arthritis or in an established model of another inflammatory disease (Mizoguchi (2012) Prog Mol Biol Transl Sci., 105:263-320; and Asquith et al., (2009) Eur J Immunol. 39:2040-4).

### Example 24: In Vivo Protection from EAE and Cuprizone in a Whole Animal

[0710] Adult 7-9 week-old female C57BL/6 mice (obtained from Charles River Laboratories) are injected in the tail base bilaterally with 200 μl of an innoculum containing 100 ng of myelin oligodendrocyte glycoprotein peptide 35-55 (amino acids MEVGWYRSPFSRVVHLYRNGK (SEQ ID NO: 885); Seqlab) and 1 mg of Mycobacterium tuberculosis H37 Ra (Difco) in incomplete Freund adjuvant (Difco). Pertussis toxin (200 ng; List Bio-logical Laboratories) is injected at day 0 and at day 2 after immunization. Clinical signs are scored as follows: 0, no clinical signs; 1, complete limp tail; 2, complete limp tail and abnormal gait; 3, one hind-limb paraparesis; 4, complete hindlimb paraparesis; and 5, fore- and hind-limb paralysis or moribund. Only mice having disease onset (clinical score of 1 or more) at day 14 are used for experiments. Agonistic anti-TREM2, and/or TREM2 bispecific antibodies are injected intraperitoneally or intravenously in EAE-diseased mice at the day of the first clinical symptoms or at any other desired time (PLoS Med (2007) 4(4): e124).

[0711] Young or aged wild-type (WT) mice are fed a standard diet (Harlan) containing 0.2% cuprizone (CPZ) powdered oxalic bis(cyclohexylidenehydrazide) (Sigma-Aldrich) for 4, 6 or 12 weeks. For Histological and immunohistochemical analyses brains are removed after mouse perfusion with 4% paraformaldehyde (PFA), fixed in 4% PFA for 24 h, followed by immersion in 30% sucrose for 24-48 h. To evaluate myelin integrity and damage, as well as cell proliferation and inflammation sections or mouse brain are stained with anti-MBP (1:100; Abcam, ab7349), -dMBP (1:2000; Millipore, ab5864), -β APP (1:100; Invitrogen, 51-2700), -SMI-31 (1:1000; Covance, smi-31R), -Ibal (1:600; Wako, 019-19741), -BrdU (1:250; Abcam, 7E5893), -GFAP (1:200; Invitrogen, 13-0300), -iNOS (1:100; BD Pharmingen, 610329), -LPL(1:400, from Dr. G. Olivecrona) and -MHC II (1:100; BD Pharmingen, 553549). For behavioral effects of the antibodies, mice are analyzed for locomotor activity using transparent polystyrene enclosures and computerized photobeam instrumentation. General activity variables (total ambulations, vertical rearings), along with indices of emotionality including time spent, distance traveled and entries, are analyzed. A battery of sensorimotor tests is performed to assess balance (ledge and platform), strength (inverted screen), coordination (pole and inclined screens) and initiation of movement (walking initiation). Motor coordination and balance are studied using a rotarod protocol (Cantoni et al., Acta Neuropaehol c2015)129(3):429-47).

### Example 25: Characterization of the Therapeutic Use of Agonistic TREM2 and/or TREM2 Bispecific Antibodies in Established Animal Models of Traumatic Brain Injury

[0712] The therapeutic utility of agonistic anti-TREM2, and/or TREM2 bispecific antibodies is tested in established animal models of traumatic brain injury (Tanaka, Y et al. (2013) Neuroscience 231 49-60). For example, a model of traumatic brain injury that induces the activation of microglia and astrocytes is used. Eight or nine week-old male C57BL/6J WT mice or progranulin heterozygous mice are used (purchased from Charles River Laboratories or Jackson Laboratories). Mice are anesthetized by intraperitoneal administration of xylazine hydrochloride (8 mg/kg) and chloral hydrate (300 mg/kg) dissolved in sterile saline, and subsequently placed in a stereotaxic apparatus (Narishige, Tokyo, Japan). An incision is made in the scalp and the cranium is exposed. The periosteum is cleaned from the skull, a hole is drilled over the right cerebral hemisphere with a dental drill, and the duramater is removed with a needle tip. A stainless steel cannula, with a 0.5 mm outer diameter, is used to make a longitudinal stab wound in the right hemisphere. The cannula is positioned at 1.3 mm lateral to the midline, and 1 mm posterior to bregma, and introduced into the brain until the tip reaches a depth of 2 mm. The cannula is then shifted 2 mm caudally (bregma 3 mm), and then shifts back 2 mm rostrally to its initial position. Finally, the cannula is removed from the brain, and the scalp wound is sutured.

[0713] Alternatively, a modified weight-drop device is used (Chen, Y., et al., (1996) J. Neurotrauma 13, 557-568). Specifically, following isoflurane anesthesia, a midline longitudinal incision is made and the skull exposed. A Teflon-tipped cone (2-mm diameter) is placed 1-2 mm lateral to the midline in the midcoronal plane. The head is manually held in place, and a 95-g weight is dropped on the cone from a prefixed height, resulting in a focal injury to the left hemisphere. After recovery from anesthesia, the mice are returned to their home cages with postoperative care and free access to food and water. Sham controls received anesthesia and skin incision only. Mice are treated with Trem2 antibodies delivered by Intraperitoneal injection at a volume of 250 ul/mouse (calculated as 100 ul/10 gr Body weight) at concentration of antibodies ranging from 4 mg/ml to 0.5 mg/ml. Control IgG antibody is injected at a concentration of 4 mg/ml. Antibodies are injected at days −3 to the traumatic brain injury and then at days 1, 7, 14, 21, 28. Neurological score (NSS) is evaluated 1 hour after TBI (to define, and ensure similar severity of injury in all groups) and then at 24 hour, and days 3, 5, 7, and once weekly till the end of the follow-up (4 weeks). Cognitive functions are being tested at days 4, 16, 32 after injury) using the novel object recognition test.

[0714] The Neurological Severity Score (NSS), is performed as described (Beni-Adani, L. et al., (2001) J. Neurotrauma 25, 324-333; Tsenter, J. et al., (2008). J. Neurotrauma 25, 324-333). Specifically, NSS consists of 10 individual tasks, including open-field performance, beam walk, balance, and hemiparesis evaluations, which reflect motor function, alertness, and behavior. One point is given for failure to perform a task and 0 for success. The NSS at 1 h post-trauma reflects the initial severity of injury. Thus, the extent of recovery (delta NSS) is calculated as the difference between the initial NSS score at 1 h postinjury and at any subsequent time point.

[0715] The novel object recognition test (NORT) is a sensitive and reproducible test for measuring cognitive abnormalities in TBI. Mice are placed for 1 h habituation period in an open glass aquarium-like transparent box, each at a time, in a sound-isolated room. On the following day they are re-introduced in the box for 5 min with two identical clean plaster objects, placed in two different corners of the box to measure baseline activity. Four hours later, one of the objects is replaced with a new one of the same size and texture, and the mice were re-introduced for additional 5 min into the same cage to test for novel object recognition. The time spent by the mouse in object exploration was recorded manually by an operator blinded to the different treatments. The cumulative time spent at each of the objects was recorded. Exploration of an object is defined as directing the nose to the object at a distance of 2 cm and/or touching it with the nose. The percentage of the total exploration time that the animal spent investigating the new object out of total exploration time is the measure of recognition memory. At baseline, the mouse spent about equal times at both objects since both are novel for him. At test, the cognitively healthy mice will identify the new object as “new”, remembering the old one, and therefore will spend more time exploring the new object (˜70-75% of the time). TBI leads to impaired memory, thus shorter (than normal) percent of the time exploring the new object. Some spontaneous recovery from TBI does occur, and could lead to TBI mice spending 60-65% of the time at the novel object. For statistical analyses, commercially available computer software (SigmaStat 2.03, Systat Software, San Jose, Calif., USA) can be used. Treatments are the independent variables and the outcomes of the TBI parameters are the dependent variables. Significance for NSS and NORT experimental series are tested using two-way ANOVA for repeated measures, and post hoc Fisher's PLSD test. Data are expressed as mean±s.e.m.

[0716] As shown in FIG. 20, a dose dependent improvement in cognitive function was observed in mice with traumatic brain injury that were treated with different doses of anti-TREM2 antibody 7E5. Cognitive function was assessed with the NORT test. Treatment groups included: 1=40 mg/Kg 7E5; 2=20 mg/Kg 7E5; 3=10 mg/Kg 7E5; 4=5 mg/Kg 7E5 and CTR=40 mg/Kg isotype control antibody mIgGl. The NORT test was performed at day 32 after injury. Bar graphs represent the percentage of time that mice spent investigating the new object. “Baseline” bar graphs represent the time spent exploring two identical objects, which is similar regardless of the treatment that the mice have received. “Test” bar graphs represent the time spent exploring a new object. The post hoc Fisher's PLSD test was used for statistical analysis *=Pval<0.05.

[0717] Mice with traumatic brain injury that were treated with the control antibody spent only 57.4±5.3% exploring the novel object, which is indicative of highly unpaired cognitive function (FIG. 20). By contrast, mice treated with the highest dose of anti-TREM2 antibody 7E5 spent 73.9±5.4% of the time exploring the novel object, which is close to normal cognitive function, indicating almost full recovery (FIG. 20).

### Example 26: Characterization of Therapeutic Use of Agonistic TREM2 and/or TREM2 Bispecific Antibodies in a Model of Neuro-Inflammation and Neuron Loss Following Toxin-Induced Injury

[0718] The therapeutic utility of agonistic anti-TREM2, and/or TREM2 bispecific antibodies is tested in a model of neuro-inflammation and neuron loss following toxin-induced injury (Martens, L H et al., (2012) The Journal of Clinical Investigation, 122, 3955). Three-month-old mice are treated with 4 intraperitoneal injections of MPTP (1-methyl-4-phenyl-1,2,3,6-tetrahydropyridine) per day for 2 days (4 μg/g body weight) (Sigma-Aldrich) or PBS. Mice are treated with agonistic anti-TREM2, and/or TREM2 bispecific antibodies according to standard protocols and then analyzed using Stereological counting to quantify dopamine neurons and microglia in the substantia nigra pars compacta (SNpc), as described.

### Example 27: Enhancement of the Ability of BMDCs to Induce Antigen-Specific T-Cell Proliferation by Agonistic and/or Bispecific TREM2 Antibodies

[0719] It is believed that agonistic anti-TREM2, and/or TREM2 bispecific antibodies may increase ability of bone marrow-derived dendritic cells (BMDC) to express the markers CD83 and CD86 and then to induce antigen-specific T-cell proliferation. To determine if TREM2 antibodies induce expression of the cell surface markers CD83 and CD86 on dendritic cells, antibodies are plated overnight at 4° C. in 12 well plates at 2 or 5 μg/ml in PBS. Wells are washed 3× with PBS the next day and day 5 immature human DCs are harvested and plated at 1 million cells per well and incubated at 37C, 5% CO₂ in the absence of cytokine. FACS analysis of CD86, CD83 and CD11c (BD Biosciences) is performed on a BD FACS Canto 48 hours later. Data analysis was performed with FlowJo (TreeStar) software version 10.0.7. Alternatively, day 5 immature human dendritic cells are plated at 100,000 cells per well in a U-bottom non-TC treated 96 well plate in media without cytokine. Antibodies are added at 5 μg/ml with or without LPS-removed anti-human secondary antibody (Jackson ImmunoResearch) at 20 μg/ml. FACS analysis for CD86, CD83, and CD11c (BD Biosciences) is performed 48 hrs post antibody addition as previously described. Ovalbumin (OVA)-specific T-cell response induced by BMDCs can be determined by CFSE dilution. BMDCs are isolated by MACS after 6 days of culture and plated at 1×10⁴ cells per well of a round bottom 96 well plate with OVA (2 or 0.5 mg/mL) and CpG DNA (100 or 25 nM) in the presence of GM-CSF (10 ng/mL) for 4 h. CD4 T-cells from the spleen and lymph nodes of OT-II transgenic mice are isolated by using Dynal Mouse CD4 Negative Isolation Kit (Invitrogen) and stained with CFSE (final 0.8 mM). After 4 h of DC culture, 1×10 CFSE-labeled CD4 OT-II T-cells are added into each well and incubated for 72 h. After culturing, cells are stained with an anti-CD4 monoclonal antibody and flow cytometry is performed to detect CFSE dilution of gated CD4 OT-II T-cells. Data analysis to calculate the percentage of divided and division index is performed by Flowjo software (Treestar) (Eur. J. Immunol. 2012. 42: 176-185).

[0720] Alternatively, Day 5 immature dendritic cells (CD14⁻CD11c⁺ LIN⁻) are plated in 12 well dishes coated the previous day with 2_{K}g/ml antibody. Plates are washed 3 times with PBS before addition of T cells. CD4⁺ T cells from nonautologous donors were isolated and labeled with CFSE before addition to DCs in ratio of 1:10. CD3/CD28 Dynal beads serve as a positive control. Day 5 post co-culture cells are analyzed by flow cytometry on a BD FACSCanto II for CFSE dilution. Percent CFSE^{hi} compared to CFSE^{lo} cells are calculated for each condition with FlowJo (TreeStar).

### Example 28: TREM2 Antibodies Induce the Expression of CD83 and CD86 on Human Dendritic Cells (DCs) and Induce T Cell Proliferation

[0721] To evaluate the ability of anti-TREM2 antibodies to modify expression of CD83 and CD86, both plate-bound and soluble antibodies were incubated with dendritic cells (DCs), and the expression of CD83, CD86, CCR7, and phosphorylated ERK were measured. To evaluate the ability of anti-TREM2 antibodies to modulate T cell proliferation, DCs were incubated with T cells and anti-TREM2 antibodies, and the level of T cell proliferation is measured. Antibodies are plated overnight at 4C in 12 well plates at 2 or 5 ug/ml in PBS. Wells are washed 3× with PBS the next day. On day 5, immature human DCs are harvested and plated at 1 million cells per well and incubated at 37C, 5% CO₂ in the absence of cytokine. FACS analysis of CD86, CD83, CD11c, HLA-DR, and LIN (BD Biosciences) are performed on a BD FACS Canto 48 hours later. Data analysis is performed with FlowJo (TreeStar) software version 10.0.7. Levels of CD83, CD86, and CCR7 are evaluated for CD11c+HLA-DR+LIN− cell populations. For intracellular ERK phosphorylation, cells are fixed with 1% formaldehyde, permeabilized with cytofix/cytoperm kit (BD), and intracellular Erk phopshorylation is determined with flow cytometry after staining with PE-ERK antibody (BD).

[0722] Alternatively, Day 5 immature human dendritic cells are plated at 100,000 cells per well in a U-bottom non-TC treated 96 well plate in media without cytokine. Antibodies are added at 5 ug/ml with or without LPS-removed anti-human secondary (Jackson ImmunoResearch) at 20 ug/ml. FACS analysis for CD86, CD83, CD11c, HLA-DR, and LIN (BD Biosciences) is performed 48 hrs post antibody addition as previously described. Additionally, Day 5 immature dendritic cells (CD14⁻ CD11c⁺ LIN⁻) are plated in 12 well dishes coated the previous day with Zug/ml antibody. Plates are washed 3 times with PBS before addition of T cells. CD4⁺ T cells from non-autologous donors were isolated and labeled with CFSE before addition to DCs in ratio of 1:10, 1:50, or 1:250. CD3/CD28 Dynal beads serve as a positive control. Day 5 post co-culture cells are analyzed by flow cytometry on a BD FACSCanto II for CFSE dilution. Percent CFSE^{hi} compared to CFSE^{lo} cells are calculated for each condition with FlowJo (TreeStar).

### Example 29: Normalization and Increase of Toll-Like Receptor (TLR) Responses in Macrophages by Agonistic and/or Bispecific TREM2, Antibodies

[0723] To evaluate the ability of anti-TREM2 antibodies to modify TLR response, Bone marrow-derived macrophages (BMDM) or primary peritoneal macrophage responses are altered to TLR signaling by deficiency of TREM2 (Turnbull, I R et al., J Immunol 2006; 177:3520-3524). It is believed that agonistic anti-TREM2, and/or TREM2 bispecific antibodies may increase or normalize TLR responses in macrophages. To elicit primary macrophages, mice are treated with 1.5 ml of 2% thioglycollate medium by intraperitoneal injection, and cells are then isolated by peritoneal lavage. To generate BMDM, total bone marrow is cultured in DMEM supplemented with 10% bovine calf serum, 5% horse serum, and 6 ng/ml recombinant human CSF-1 (R&D Systems). Cells are cultured for 5-6 days, and adherent cells are detached with 1m MEDTA in PBS. Cells are stained with commercially available antibodies: anti-CD11b, anti-CD40, anti-GR1 (BD Pharmingen), and F4/80 (Caltag Laboratories). BMDM are re-plated and allowed to adhere for 4 h at 37° C., and then TLR agonists, such as LPS (Salmonella abortus equi), zymosan (Saccharomyces cerevisiae), and CpG 1826 DNA (purchased from e.g., Sigma-Aldrich) are added. Cell culture supernatant is collected 24 h after stimulation and the levels of IFN-α4, IFN-b, IL-6, IL-12 p70, and TNF Cytokine concentrations in the culture supernatants are determined using mouse IFN-α4, IFN-b, IL-6, IL-12 p70, TNF, and IL-10 ELISA kits (eBioscience) and VeriKine Mouse IFN-b ELISA kit (PBL interferon source) according to manufacturer's protocol. Alternatively Cytometric Bead Array for human or mouse cytokines (BD Biosciences), or a V-PLEX Human or mouse Cytokine system with the Meso scale discovery System can be used. Alternatively, to analyze cytokines secretion BM derived macrophages of the indicated genotype are harvested at day 5 and plated on 96-well plate at 10⁵ cells/well. Cells are then stimulated with the indicated concentration of LPS or zymosan. 24 hours later, cell culture supernatants are harvested and analyzed by FACS for the presence of inflammatory cytokines (IL-12, IL-10, IFN-γ, TNFa, IL-6, MCP-1) using a Cytometric Bead Array kit (BD, following manufacturer's instructions). Cells are also analyzed by FACS to assess viability (DAPI) and expression of surface markers (CD11b, CD86).

### Example 30: TREM2 Increases Secretion of Inflammatory Cytokines from Macrophages

[0724] Bone marrow-derived macrophages (BMDM) or primary peritoneal macrophage responses possess altered TLR signaling when deficient in TREM2 (Turnbull, I R et al., J Immunol 2006; 177:3520-3524). In order to determine whether TREM2 antibodies induce changes in inflammatory cytokine production, mouse wild-type (WT) and TREM2 knock-out mice (KO) or TREM2 heterozygous mice (HETS) are cultured with the antibodies alone or with the antibodies in combinations with non-saturating levels of TLR stimulators and the level of cytokines are measured after 24-48h. To generate BMDM, total bone marrow from wild-type (WT), was cultured in RPMI supplemented with 10% bovine calf serum, 5% horse serum, and 50 ng/ml recombinant mouse CSF-1 (R&D Systems). Cells are cultured for 5 days, and adherent cells are detached with 1 mM EDTA in PBS. BMDM are plated on 96-well plates at 10⁵ cells/well and allowed to adhere for 4 h at 37° C. Cells are then exposed to antibodies alone, stimulated with TLR agonists LPS (Salmonella abortus equi) or zymosan (Saccharomyces cerevisiae) at concentrations ranging from 0.01-100 ng/ml (LPS) or 0.01-100 □g/ml (zymosan) alone or stimulated with LPS or zymosan in combination with Trem2 antibodies. Alternatively, macrophages isolated from WT and KO mice are cultured in the presence of 10 ng/ml of the cytokine IL-4 or 50 ng/ml of IFN-gamma with or without Trem2 antibodies. Cell culture supernatant was collected 24 or 48 h after stimulation and the levels of TNFa, IL-6, IL-10, and MCP-1 cytokines were measured by using Cytometric Bead Array Mouse Inflammation Kit (BD) according to manufacturer's protocol.

### Example 31: In Vivo Effect of Anti-TREM2 Antibodies on Inflammatory Cytokine Production

[0725] Mouse macrophages were stimulated directly in vivo on Brewer's Thioglycollate-induced peritoneal macrophages and then the concentration of cytokines in the peritoneal cavity was measured. In order to determine whether TREM2 antibodies induce changes in inflammatory cytokine production, wild-type (WT) mice and TREM2 knock-out mice (KO) were injected intraperitoneally with 3 ml of 3% Brewer's Thioglycollate at day 0. At day 3, mice were injected intraperitoneally with anti-TREM2 antibody 7E5 or isotype control antibody (mIgG1) for 15 min or 24 hr. Peritoneal cells were then harvested by peritoneal lavage using 4 ml saline solution and washed with PBS. Levels of TNFa and MCP-1/CCL2 cytokines were measured by using Cytometric Bead Array Mouse Inflammation Kit (BD) according to manufacturer's protocol.

[0726] As shown in FIGS. 21A and 21B, when WT mice were treated with the 7E5 antibody the level of TNFa and CCL2 increased, as compared to mice treated with the isotype control antibody. In particular, the concentration of TNFa increased about 6-fold in mice treated with antibody 7E5, as compared to isotype control treated mice (FIG. 21A). The concentration of CCL2 increased ˜2 fold in mice treated with antibody 7E5, as compared to isotype control treated mice (FIG. 21B). The 7E5 antibody does not have an effect when administered to KO mice (FIGS. 21A and 21B). The results indicate that the induction of TNFa and CCL2 is specific to TREM2.

### Example 32: Inhibition of the Anti-Inflammatory Cytokine IL-10 in Bone Marrow-Derived Myeloid Precursor Cells by Agonistic and/or Bispecific TREM2 Antibodies

[0727] It is believed that bone marrow-derived myeloid precursor cells may show a decrease in the anti-inflammatory cytokine IL-10 following treatment with agonistic anti-TREM2, and/or TREM2 bispecific antibodies and stimulation with 100 ng/ml LPS (Sigma), by co-culturing with apoptotic cells, or by a similar stimulus. Isolation of bone marrow-derived myeloid precursor cells is performed as follows. Bone marrow cells are isolated from adult 6-8 week-old female C57BL/6 mice (Charles River, Sulzfeld, Germany) and from TREM2 deficient mice (KOMP repository) from the medullary cavities of the tibia and femur of the hind limbs. Removal of erythrocytes is performed by lysis with hypotonic solution. Cells are cultured in DMEM medium (Invitrogen) containing 10% fetal calf serum (Pan Biotech) and 10 ng/ml of GM-CSF (R&D Systems) in 75 cm² culture flasks (Greiner Bio-One). After 24 h, non-adherent cells are collected and re-seeded in fresh 75 cm² culture flasks. Medium is changed after 5 d and cells are cultured for an additional 10-11 d. Cells are cultured in the presence or absence of Trem2 antibodies, supernatant is collected after 24 h, and the level of IL-10 released from the cells is determined by IL-10 ELISA according to manufacturer's instructions (QuantikineM mouse IL-10, R&D Systems) (JEM (2005), 201; 647-657; and PLoS Medicine (2004), 4|Issue 4|e124).

### Example 33: Induction of Phagocytosis in Cells from the Myeloid Lineage by Agonistic and/or Bispecific TREM2 Antibodies

[0728] It is believed that agonistic anti-TREM2 and/or TREM2 bispecific antibodies may induce phagocytosis of apoptotic neurons, nerve tissue debris, non-nerve tissue debris, bacteria, other foreign bodies, and disease-causing proteins, optionally, such as A beta peptide, alpha synuclein protein, Tau protein, TDP-43 protein, prion protein, huntingtin protein, RAN, translation Products antigen, including the DiPeptide Repeats, (DPRs peptides) composed of glycine-alanine (GA), glycine-proline (GP), glycine-arginine (GR), proline-alanine (PA), or proline-arginine (PR) in cells from the myeloid lineage, such as monocytes, Dendritic cells macrophages and microglia. The bispecific antibodies may be antibodies that recognize the TREM2 antigen and a second antigen that includes, without limitation, A beta peptide, antigen or an alpha synuclein protein antigen or, Tau protein antigen or, TDP-43 protein antigen or, prion protein antigen or, huntingtin protein antigen, or RAN, translation Products antigen, including the DiPeptide Repeats, (DPRs peptides) composed of glycine-alanine (GA), glycine-proline (GP), glycine-arginine (GR), proline-alanine (PA), or proline-arginine (PR). Monocytes are isolated from peripheral blood that is collected from adult C57BL/6 mice. Hypotonic lysis buffer depletes erythrocytes. Cells are plated on culture dishes in RPMI medium (Invitrogen) containing 10% fetal calf serum (Pan Biotech). Cells are cultured for several hours at 37° C. in 10% CO₂. After trypsinization, adherent cells are collected and used for phagocytosis experiments.

[0729] Microglial cells are prepared from the brains of post-natal day 3 to 5 (P3 to P5) C57BL/6 mice. In brief, meninges are removed mechanically, and the cells are dissociated by trituration and cultured in basal medium (BME; GIBCO BRL) supplemented with 10% FCS (PAN Biotech GmbH), 1% glucose (Sigma-Aldrich), 1% L-glutamine (GIBCO BRL), and 1% penicillin/streptomycin (GIBCO BRL), for 14 d to form a confluent glial monolayer. To collect microglial cells, the cultures are shaken on a rotary shaker (200 rpm) for 2 h. The attached astrocytes are used for immunohistochemistry. The detached microglial cells are seeded in normal culture dishes for 1 h, and then all non-adherent cells are removed and discarded. Purity of the isolated microglial cells is about 95% as determined by flow cytometry analysis with antibody directed against CD11b (BD Biosciences). Microglial cells are cultured in basal medium as previously described (Hickman S E et al., J Neurosci. 2008 Aug. 13; 28(33):8354-60; and Microglia Methods and Protocols Vol. 1041). Oligodendrocytes (i.e., neurons) and neuron-enriched cells are prepared from the brain of C57BL/6 mouse embryos (E15-16). In brief, brain tissue is isolated and mechanically dispersed and seeded in culture dishes pre-coated with 0.01 mg/ml poly-L-ornithin (Sigma-Aldrich) and 10 μg/ml laminin (Sigma-Aldrich). Cells are cultured in neuronal condition medium (BME; GIBCO BRL) supplemented with 2% B-27 supplement (GIBCO BRL), 1% glucose (Sigma-Aldrich), and 1% FCS (PAN Biotech GmbH). Cells are cultured for 5-10 d to obtain morphologically mature oligodendrocytes.

[0730] To conduct phagocytosis assays microglia, macrophages or dendritic cells are cultured with apoptotic neurons, nerve tissue debris, non-nerve tissue debris, bacteria, other foreign bodies, and disease-causing proteins. Neurons are cultured for 5-10 d, and okadaic acid is then added at the final concentration of 30 nM for 3 h to induce apoptosis. Neuronal cell membranes are labeled with CellTracker CM-DiI membrane dye (Molecular Probes). After incubation, apoptotic neurons or other targets of phagocytosis are washed two times and added to the transduced microglial culture at an effector/target ratio of 1:20. At 1 and 24 h after addition of apoptotic neurons, the number of microglia having phagocytosed neuronal cell membranes is counted under a confocal fluorescence microscope (Leica). Apoptotic cells are counted in three different areas at a magnification of 60. The amount of phagocytosis is confirmed by flow cytometry. Moreover, 24, 48, or 72 h after the addition of apoptotic neurons, cells are collected and used for RT-PCR of cytokines. To conduct microsphere bead or bacterial phagocytosis assay, microglia, macrophages or dendritic cells are treated with anti-TREM2 agonistic antibodies. After 24 h, 1.00 μm of red fluorescent microsphere beads (Fluoresbrite Polychromatic Red Microspheres; Polysciences Inc.) or, fluorescent labeled bacteria are added for 1 h. Phagocytosis of microsphere beads or, fluorescent labeled bacteria, by microglia is analyzed by fluorescence microscopy. Furthermore, microglia are collected from the culture plates and analyzed by flow cytometry. The percentage of microglia having phagocytosed beads is determined. To conduct amyloid phagocytosis assay, HiLyteFluor™ 647 (Anaspec)-Abeta-(1-40) is resuspended in Tris/EDTA (pH 8.2) at 20 mM and then incubated in the dark for 3 d at 37° C. to promote aggregation. Microglial, macrophages or dendritic cells are pretreated in low serum (0.5% FBS supplemented with insulin), LPS (50 ng/ml), IFNc (100 units/ml), and anti-TREM2 agonistic antibodies for 24 h prior to the addition of aggregated fluorescently labeled a beta peptide. Amyloid phagocytosis and surface expression of TREM2 are determined by flow cytometric analysis 5 h post-addition of 100 nM aggregated HiLyteFluor™ 647-Ab-(1-40) (ASN NEURO (2010) 2(3): 157-170). Phagocytosis of other disease-causing proteins is conducted in a similar manner.

### Example 34: Induction of CCR7 and Migration Toward CCL19 and CCL21 in Microglia, Macrophages, and Dendritic Cells by Agonistic TREM2, or TREM2 Bispecific Antibodies

[0731] It is believed that anti-TREM2, and/or TREM2/bispecific antibodies may induce CCR7 and migration toward CCL19 and CCL21 in microglial cells, macrophages, and dendritic cells. Microglial, macrophages or dendritic cells are either cultured with agonistic anti-TREM2, and/or TREM2/DAP12 bispecific antibodies, or with a control antibody. Cells are collected after 72 h, immuno-labeled with CCR7 specific anti-bodies, and analyzed by flow cytometry. To determine any functional consequences of increased CCR7 expression, a chemotaxis assay is performed. Microglia, macrophages or dendritic cells are stimulated via TREM2 with the agonistic anti-TREM2, and/or TREM2/DAP12 bispecific antibodies and placed in a two-chamber system. The number of microglial cells migrating toward the chemokine ligands CCL19 and CCL21 is quantified (JEM (2005), 201, 647-657). For the chemotaxis assay, microglial, macrophages or dendritic cells are exposed to the agonistic anti-TREM2 or TREM2/bispecific antibodies and treated with 1 μg/ml LPS. Microglia, macrophages or dendritic cells are transferred into the upper chamber of a transwell system (3 μm pore filter; Millipore) containing 450 μl medium with 100 ng/ml CCL19 or CCL21 (both from PeproTech) in the lower chamber. After a 1 h incubation period, the number of microglial macrophages or dendritic cells that have migrated to the lower chamber is counted in three independent areas by microscopy (JEM (2005), 201, 647-657).

### Example 35: Induction of F-Actin in Microglia, Macrophages, and Dendritic Cells by Agonistic TREM2, and/or TREM2 Bispecific Antibodies

[0732] It is believed that agonistic anti-TREM2, or TREM2 bispecific antibodies may induce F-actin in microglial cells, macrophages, and dendritic cells. Microglia, macrophages or dendritic cells and other cells of interest that are transduced with TREM2 or that express TREM2 are added to culture plates and then exposed to agonistic anti-TREM2, and/or TREM2 bispecific antibodies, or a control antibody. Cells are fixed, blocked, and then stained with Alexa Fluor 546-conjugated phalloidin (Molecular Probes) after 1 h and F-actin is labeled with a fluorescence dye. Images are collected by confocal laser scanning microscopy with a 40× objective lens (Leica). (JEM (2005), 201, 647-657).

### Example 36: Induction of Osteoclast Production and Increased Rate of Osteoclastogenesis by Agonistic TREM2, DAP12, and/or TREM2/DAP12 Bispecific Antibodies

[0733] It is believed that agonistic anti-TREM2 and/or TREM2 bispecific antibodies may induce osteoclast production and increase the rate of osteoclastogenesis. RAW264.7 cells that make osteoclasts or bone marrow-derived monocyte/macrophage (BMM) precursor cells are maintained in RPMI-1640 medium (Mediatech), or another appropriate medium, supplemented with 10% FBS (Atlantic Biologics, Atlanta, Ga., USA) and penicillin-streptomycin-glutamine (Mediatech). TREM2B cDNA with a FLAG epitope added to the N terminus is inserted into the retroviral vector pMXpie upstream of an IRES, followed by an eGFP cDNA sequence. Cells are transfected with pMXpie-FLAG TREM2B, using Fugene 6 (Roche) according to manufacturer's protocol. Cells are selected in puromycin (Sigma) at 2 μg/ml. Stable puromycin-resistant clones are screened for anti-FLAG M2 monoclonal antibody (Sigma) binding by using flow cytometry, and then subcloned and maintained on puromycin selection media.

[0734] RAW264.7 cells expressing TREM2B are seeded in 96-well plates with 3000 cells/well in alpha-MEM medium supplemented with 10% FBS, penicillin-streptomycin-glutamine, 50 ng/ml RANKL, and 20 ng/ml M-CSF. The medium is changed every 3 days, exposed to anti-TREM2 agonistic antibodies and the number of multinucleated (at least three nuclei) TRACP⁺ osteoclasts are counted and scored by light microscopy. To determine complexity and size, osteoclasts are counted by number of nuclei (>10 or 3-10 nuclei). The surface area of osteoclasts is also measured by using Image J software (NIH). In addition, expression levels of osteoclasts genes are determined. Total RNA is extracted from osteoclastogenic cultures at different time points using TRIzol reagent (Invitrogen). After first-strand cDNA synthesis using a SuperScript III kit (Invitrogen), real-time quantitative PCR reactions are performed for Nfatcl, Acp5, Ctsk, Cater, and Ccndl. Relative quantification of target mRNA expression is calculated and normalized to the expression of cyclophilin and expressed as (mRNA of the target gene/mRNA of cyclophilin) 3×10⁶. (J. OF BONE AND MINERAL RESEARCH (2006), 21, 237-245; J Immunol 2012; 188:2612-2621).

[0735] Alternatively, BMM cells are seeded onto the plates in triplicate wells and treated with RANKL, M-CSF, and with an anti-TREM2, and/or TREM2 bispecific antibody, or an isotype-matched control monoclonal antibody. The medium is changed every 3 days until large multinucleated cells are visible. After 3 to 5 days in culture, cells are fixed with 3.7% formaldehyde in PBS for 10 min. Plates are then washed twice in PBS, incubated for 30 s in a solution of 50% acetone and 50% ethanol, and washed with PBS. Cells are stained for tartrate-resistant acid phosphatase (TRAP) with a kit from Sigma (product 435). Multinucleated (more than two nuclei), TRAP-positive cells are then counted by light microscopy, as described (e.g., Peng et al., (2010) Sci Signal., 3(122): ra38).

### Example 37: Characterization of the Therapeutic Use of Agonistic TREM2 and/or TREM2 Bispecific Antibodies in Animal Models of Aging, Seizures, Spinal Cord Injury, Retinal Dystrophy, Frontotemporal Dementia, and Alzheimer's Disease

[0736] The therapeutic utility of agonistic anti-TREM2, and/or TREM2 bispecific antibodies is tested in animal models for aging, seizures, spinal cord injury, retinal dystrophy, frontotemporal dementia, Huntington disease, Parkinson's disease amyotrophic lateral sclerosis and Alzheimer's disease, as previously described (e.g., Beattie, M S et al., (2002) Neuron 36, 375-386; Volosin, M et al., (2006) J. Neurosci. 26, 7756-7766; Nykjaer, A et al., (2005) Curr. Opin. Neurobiol. 15, 49-57; Jansen, P et al., (2007) Nat. Neurosci. 10, 1449-1457; Volosin, M et al., (2008) J. Neurosci. 28, 9870-9879; Fahnestock, M et al., (2001) Mol. Cell Neurosci. 18, 210-220; Nakamura, K et al., (2007) Cell Death. Differ. 14, 1552-1554; Yune, T et al., (2007) Brain Res. 1183, 32-42; Wei, Y et al., (2007) Neurosci. Lett. 429, 169-174; Provenzano, M J et al., (2008) Laryngoscope 118, 87-93; Nykjaer, A et al., (2004) Nature 427, 843-848; Harrington, A W et al., (2004) Proc. Natl. Acad. Sci. U.S.A. 101, 6226-6230; Teng, H K et al., (2005) J. Neurosci. 25, 5455-5463; Jansen, P et al., (2007) Nat. Neurosci. 10, 1449-1457; Volosin, M et al., (2008) J. Neurosci. 28, 9870-9879; Fan, Y J et al., (2008) Eur. J. Neurosci. 27, 2380-2390; Al-Shawi, R et al., (2008) Eur. J. Neurosci. 27, 2103-2114; and Yano, H et al., (2009) J. Neurosci. 29, 14790-14802).

### Example 38: Characterization of the Therapeutic Use of Agonistic TREM2 and/or TREM2 Bispecific Antibodies in Models of Atherosclerosis

[0737] The therapeutic utility of agonistic anti-TREM2 and/or TREM2 bispecific antibodies is tested in models of atherosclerosis, as previously described (e.g., Lance, A et al., (2011) Diabetes, 60, 2285; and Kjolby, M et al., (2012) Cell Metabolism 12, 213-223).

### Example 39: Characterization of the Therapeutic Use of Agonistic TREM2 and/or TREM2 Bispecific Antibodies in a Model of Infection

[0738] The therapeutic utility of agonistic anti-TREM2 and/or TREM2 bispecific antibodies is tested in a model of infection. For example, Listeria monocytogenes or other infection in normal mice can be used, as previously described (e.g., Yin, F et al., (2009) J. Exp. Med, 207, 117-128).

### Example 40: Screening for Anti-TREM2 and/or TREM2 Bispecific Antibodies that Induce Phosphorylation of TREM2, DAP12, SYk, ERK, and AKT, which Indicate Activation of the PI3K Pathway

[0739] Cells (J774, RAW 264.7, BMM cells, or osteoclasts) are removed from tissue culture dishes with PBS-EDTA, washed with PBS, and counted. J774 (40×10⁶) or RAW 264.7 cells (10×10⁶ BMM or osteoclasts) are incubated with an anti-TREM2 and/or TREM2 bispecific antibody or with an isotype-matched control antibody at 1 μg/10⁶ cells for 20 min on ice or under other conditions. Cells are lysed in ice-cold radioimmunoprecipitation assay (RIPA) buffer for 20 min followed by centrifugation at 16,000 g for 10 min at 4° C. to remove insoluble materials. The resulting supernatant is subjected to immunoprecipitation reactions with the indicated antibodies (DAP12, ERK, or AKT) and protein A- or protein G-agarose (Sigma). The beads are extensively washed with RIPA buffer and the proteins are separated by SDS-polyacrylamide gel electrophoresis (SDS-PAGE). The proteins are then transferred to nitrocellulose membranes by Western blotting, incubated with the appropriate antibodies (antibodies that specifically recognize the phosphorylated form of DAP12, ERK, or AKT) and visualized with the enhanced chemiluminescence (ECL) system (Pierce), as described (e.g., Peng et al., (2010) Sci Signal., 3(122): ra38).

### Example 41: Screening for Anti-TREM2, and/or TREM2 Bispecific Antibodies that Induce Calcium Flux

[0740] BMM cells are washed twice with HEPES-containing buffer [20 mM HEPES (pH 7.3), 120 mM NaCl, 1 mM CaCl, 1 mM MgCl, 5 mM KCl, glucose (1 mg/ml), bovine serum albumin (1 mg/ml)] followed by incubation in 0.05% Pluronic F-127 (Invitrogen) and 1 μM Indo-1 AM (Invitrogen) for 20 min at 37° C. Cells are washed twice with HEPES buffer and are then stimulated with an anti-TREM2 and/or TREM2 bispecific antibody (16 μg/ml) or with a control antibody (16 μg/ml) and monitored by spectrophotometer (PTL Photon Technology International). The Indo-1 fluorescence emission is converted to calcium (Ca²) according to manufacturer's instructions (e.g., Peng et al., (2010) Sci Signal., 3(122): ra38).

### Example 42: Screening for Anti-TREM2 and/or TREM2 Bispecific Antibodies that Promote Survival of Osteoclasts and/or Microglia

[0741] Murine Bone Marrow precursors are obtained by flushing tibial and femoral marrow cells with cold PBS. After one wash with PBS, erythrocytes are lysed using ACK Lysing Buffer (Lonza), washed twice with PBS and suspended at 0.5×10⁶ cells/ml in complete RPMI media (10% FCS, Pen/Strep, Gln, neAA) with the indicated amounts of 50 ng/ml M-CSF to make macrophages or 10 ng/ml GM-CSF. For M2-type macrophages, 10 ng/ml IL-4 is added to the cultured cells. For M1-type macrophages, 50 ng/ml IFN-γ is added. In some experiment LPS or zymosan is added to the cell culture at day 5, at a concentration of 1 μg/ml-0.01 ng/ml. Recombinant cytokines were purchased by Peprotech. To analyze viability of BM derived macrophages, cells of the indicated genotype are prepared as above and cultured in graded concentrations of MCSF. Cells are either plated at 10⁵/200 μl in a 96-well plate (for viability analysis using a luciferase based-assay) or at 0.5×10⁶/1 ml in a 6-well plate (for Trypan Blue exclusion cell count) in non-tissue culture treated plates. Media containing fresh M-CSF is added at day 3. At the indicated time points cells are gently detached from the plates with 3 mM EDTA and counted using a Burker chamber. In some experiments cells are also stained for FACS analysis using CD11b antibody and DAPI. Alternatively, cells are directly incubated with ToxGlo reagent (Promega) and luciferase activity is determined. In some experiments MCSF is withdrawn or not from the culture media at day 5 and cell viability is analyzed 36 hours later by FACS. Mature osteoclast cell cultures are differentiated in 24-well dishes with RANKL and M-CSF. After 4 days, complete medium is substituted with serum-free medium to induce apoptosis. Cells are treated with RANKL, PBS, and an anti-TREM2 and/or TREM2 bispecific antibody, or an isotype-matched control antibody, during the overnight serum starvation. Cells are fixed in 1% paraformaldehyde and stained with a TUNEL-based kit (Millipore Corporation) according to manufacturer's instructions. Apoptotic nuclei are counted with a Nikon TE2000-E microscope with 20× magnification. Results are expressed as the percentage of apoptotic cells relative to the total number of cells in six randomly selected fields of the two wells, as described (e.g., Peng et al., (2010) Sci Signal., 3(122): ra38). Similar assays are performed with primary microglial cells.

### Example 43: TREM2 Increases the Survival of Macrophages and Dendritic Cells

[0742] To evaluate the role of TREM2 in cell survival, wild-type (WT), TREM2 knock-out (KO), and TREM2 heterozygous (Het) macrophages and dendritic cells are cultured in the presence of Trem2 antibodies or fragment thereof and cell viability is determined.

[0743] Murine bone marrow precursor cells from TREM2 WT, Het, and KO mice are obtained by flushing tibial and femoral marrow cells with cold PBS. After one wash with PBS, erythrocytes are lysed using ACK Lysing Buffer (Lonza), washed twice with PBS and suspended at 0.5×10⁶ cells/ml in complete RPMI media (10% FCS, Pen/Strep, Gln, neAA) with the indicated amounts of 50 ng/ml M-CSF to produce macrophages, or 10 ng/ml GM-CSF to produce dendritic cells. For M2-type macrophages, 10 ng/ml IL-4 is added to the cultured cells. For M1-type macrophages, 50 ng/ml IFN-α is added. In some experiments LPS or zymosan is added to the cell culture at day 5 at a concentration range of 1 μg/ml-0.01 ng/ml. Recombinant cytokines are purchased from Peprotech. To analyze viability of bone marrow-derived macrophages, cells are prepared as above and cultured in MCSF. Cells are either plated at 10⁵/200 μl in a 96-well plate (for viability analysis using a luciferase based-assay) or at 0.5×10⁶/1 ml in a 6-well plate (for Trypan Blue exclusion cell count) in non-tissue culture treated plates. Media containing fresh M-CSF is added at day 3. At indicated time points cells are gently detached from the plates with 3 mM EDTA and counted using a Burker chamber. For FACS analysis of live cells, macrophages are cultured either in 50 ng/ml MCSF for 6 days (+MCSF) or in 50 ng/ml MCSF for 4 days before MCSF is removed for an additional 36 hrs (−MCSF). Cells are stained using CD11b antibody and DAPI. For luciferase viability assays, cell viability is measured at day 5 of culture in graded concentrations of growth factors GMCSF (dendritic cells), MCSF (M1 macrophages), or MCSF+IL-4 (M2 macrophages). Cells are directly incubated with ToxGlo reagent (Promega) and luciferase activity (luminescence) is determined. For FACS analysis of viable macrophages cultured in the presence of inflammatory mediators IFN-α, LPS, or zymosan, cells are collected at day 5 and stained using CD11b antibody and DAPI. All experiments are conducted in the presence or absence of Trem2 antibodies or control antibodies or fragments thereof. Alternatively, WT mice are injected with 40 mg/kg or another dose of TREM2 or control antibodies intraperitoneally (IP) followed by IP injections of 2-4 mg/kg LPS 12-24h latter. Cells are collected from the abdominal cavity 6 hours later and analyzed by FACS using the following markers; CD11b-PB; CD11c Pecy7; MHC-II APCcy7; Grl FITC; Ly6G PE; Amcyan live/dead cells.

### Example 44: Screening for Anti-TREM2 and/or TREM2 Bispecific Antibodies that Normalize TREM2/TYROBP-Dependent Changes in Gene Expression within the Immune/Microglia Regulatory Module

[0744] Microglial cells derived from mouse embryonic stem cells are genetically modified by lentiviral vectors to overexpress either full-length or a truncated version of Tyrobp that lacks both intracellular immunoreceptor tyrosine-based activation motif (ITAM) motifs. Microglia cells are also derived from mouse embryonic stem cells that are heterozygous for TREM2. To assess the genome-wide gene-expression changes in response to the perturbation of Tyrobp or TREM2, gene-expression data is derived from the RNA sequencing of mouse microglial macrophages or dendritic cells overexpressing: (1) vehicle, (2) full-length Tyrobp, or (3) dominant-negative truncated Tyrobp; or (4) overexpressing a knockdown construct for TREM2, such as SiRNA and cells which are heterozygous for TREM2 as well as from cells derived from TREM2 deficient mouse. Approximately 2,638 and 3,415 differentially expressed genes for the overexpression of full-length Tyrobp and truncated Tyrob are identified, respectively (Zhang et al., (2013) Cell 153, 707-720). Approximately 99% of the differentially expressed genes from the microglia overexpressing intact Tyrobp are downregulated compared to the control vehicle. For example, 658 genes, related to the vacuole/autophagy, as well as genes involved with RNA metabolism and cell-cycle mitosis are downregulated by active Tyrobp, but upregulated in cells expressing dominant-negative truncated Tyrobp. Conversely, some 2,856 genes for the vacuole/autophagy pathway and for mitochondrion are selectively upregulated in microglia expressing the dominant-negative truncated Tyrobp. Agonistic anti-TREM2, and/or TREM2 bispecific antibodies are screened for their ability to elicit gene expression profiles similar to that observed in normal microglial cells and in microglial cells overexpressing intact Tyrobp in cells that express dominant-negative truncated Tyrobp (Zhang et al., (2013) Cell 153, 707-720), in cells that express the knockdown construct for TREM2, or in cells that are heterozygous for TREM2. Antibodies that are capable of changing the gene expression network are selected.

### Example 45: Analysis of the Anti-Cancer Effect of TREM2 Antibodies

[0745] Groups of 10 C57B16/NTac mice at 8 weeks (+/−2 weeks) of age are challenged subcutaneously with tumor cells (e.g. 1×10⁵ to 1×10⁶ MC38, Lewis Lung, or B16 cells) suspended in 100 ul PBS. Animals are anesthetized with isoflurane prior to implant. Starting at day 2, groups of mice are injected intraperitoneally every 3 days for 4 doses with 200 ug of each of antagonistic anti-TREM2 antibodies, such as those described in Examples 38 and 40. Tumor growth is monitored with a caliper biweekly to measure tumor growth starting at day 4. The endpoint of the experiment is a tumor volume of 2000 mm³ or 60 days. Tumor growth and percent survival are the outcome measures. Reduced tumor take and growth rate, reduced number of tumor infiltrating immune suppressor macrophages, and increased effector T cell influx into the tumor indicate the anti-cancer effects of blocking anti-TREM2 antibodies.

### Example 46: Analysis of Additive Anti-Tumor Effect of Combination Therapy that Combines TREM2 Antibodies with Antibodies Against Inhibitory Checkpoint Proteins or Inhibitory Cytokines/Chemokines and their Receptors

[0746] Groups of 15 C57B16/NTac mice at 8 weeks (+/−2 weeks) of age are challenged subcutaneously with tumor cells. Animals are anesthetized with isoflurane prior to implant. Starting at day 2, mice are injected i.p. every 3 days for 4 doses with 200 ug anti-TREM2 antibodies alone or in combination with antibodies against checkpoint proteins (e.g. anti-PDL1 mAb clone 10F.9G2 and/or anti-CTLA-4 mAb clone UC10-4F10-11) at day 3, 6, and 9. Treatment groups include anti-TREM2; anti-CTLA-4; anti-PDL1; anti-TREM2+anti-CTLA-4; anti-TREM2+anti-PDL1; and isotype control. Tumor growth is monitored with a caliper biweekly to measure tumor growth starting at day 4. The endpoint of the experiment is a tumor volume of 2000 mm³ or 60 days. Tumor growth and % survival are the outcome measures. A decrease in tumor growth and an increase in % survival with combination therapy indicate that anti-TREM2 antibodies have additive or synergistic therapeutic effects with anti-checkpoint antibodies. Antagonistic antibodies against checkpoint molecules include antibodies against PDL1, PDL2, PD1, CTLA-4, B7-H3, B7-H4, HVEM, BTLA, KIR, GALS, TIM3, A2AR, LAG-3, and phosphatidylserine (PS). Antagonist antibodies against inhibitory cytokines include antibodies against CCL2, CSF-1, and IL-2.

### Example 47: Analysis of Additive Anti-Tumor Effect of Combination Therapy that Combines TREM2 Antibodies with Antibodies that Activate Stimulatory Checkpoint Proteins

[0747] Groups of 15 C57B16/NTac mice at 8 weeks (+/−2 weeks) of age are challenged subcutaneously with tumor cells. Animals are anesthetized with isoflurane prior to implant. Starting at day 2, mice are injected intraperitoneally every 3 days for 4 doses with 200 ug anti-TREM2 antibodies alone or in combination with agonistic antibodies that activate stimulatory checkpoint proteins (e.g., OX40 or ICOS mAb) at day 3, 6, and 9. Tumor growth is monitored with a caliper biweekly to measure tumor growth starting at day 4. The endpoint of the experiment is a tumor volume of 2000 mm³ or 60 days. Tumor growth and percent survival are the outcome measures. A decrease in tumor growth and an increase in % survival with combination therapy indicate that anti-TREM2 antibodies have additive or synergistic therapeutic effects with stimulatory checkpoint antibodies. Stimulatory checkpoint antibodies include agonistic/stimulatory antibodies against CD28, ICOS, CD137, CD27, CD40, and GITR.

### Example 48: Analysis of Anti-Stroke Effect of TREM2 Antibodies

[0748] Transient occlusion of the middle cerebral artery (MCAO)—a model that closely resembles human stroke is used to induce cerebral infarction in mice. Monofilament (70SPRe, Doccol Corp, USA) is introduced into the internal carotid artery through an incision of the right common carotid artery. The middle cerebral artery is occluded for 30 minutes with a range of reperfusion times (6 h, 12 h, 24 h, 2 d, 7 d and 28 d). The effect of surgery is controlled using sham animals at 12 h and at 7 d. Sham animals undergo the same surgical procedure without occlusion of the middle cerebral artery. MCAO animals treated with agonistic anti-TREM2 antibodies or control antibodies are tested for infarct volumetry, acute inflammatory response (12 h reperfusion), transcription of pro-inflammatory cytokines TNFa, IL-1α, and IL-lb, microglial activity (CD68, Ibal), transcription of chemokines CCL2 (MCP1), CCL3 (MIPla and the chemokine receptor CX3CR1 and invasion of CD3-positive T-cells (Sieber et al. (2013) PLoS ONE 8(1): e52982. doi:10.1371/journal.pone.0052982.).

### Example 49: Analysis of Anti-Alzheimer's Disease Effect of Anti-TREM2 Antibodies

[0749] To evaluate the ability of anti-TREM2 antibodies to delay, prevent, or reverse the development of Alzheimer's disease (AD), 5XFAD mice are used. 5XFAD mice overexpress mutant human APP (695) with the Swedish (K670N, M671L), Florida (1716V), and London (V717I) familial Alzheimer's disease (FAD) mutations, along with human PS1 harboring two FAD mutations, M146L and L286V. Both transgenes are regulated by the mouse Thyl promoter to drive over expression on the brain and recapitulate major features of AD. Mice treated with the agonistic anti-TREM2 antibodies or with control antibodies are tested for A beta plaque load with immunohistochemistry and by ELISA of tissue extracts. They are further tested for the number of microglia in the brain, and for reduction in cognitive deficit using Morris Water maze, a spatial learning and memory task, Radial Arm Water Maze, a spatial learning and memory task, Y Maze (quantifies spontaneous alternation as a measure of spatial cognition), novelty preference in in an open field, operant learning to assess learning and memory, and fear conditioning (mousebiology.org website; Wang et al., (2015) Cell, pii: S0092-8674(15)00127-0).

### Example 50: Analysis of the Protective Effect of TREM2 Antibodies in Respiratory Tract Infections

[0750] To evaluate the ability of TREM2 antibodies to delay, prevent, or treat bacterial respiratory tract infections, a preclinical mouse model involving challenge of C57B16 mice with Streptococcus pneumoniae is used. This model involves intranasal (i.n.) administration of 105 CFU S. pneumoniae serotype 3 (ATCC 6303) as described (see, e.g., Sharif 0 et al, 2014 PLoS Pathog. 2014 June; 10(6): e1004167; and Schabbauer G et al, 2010 J Immunol 185: 468-476). In this model ˜90% WT C57B16 mice succumb to infection within 6 days post infection. Ten to fifteen mice/group are challenged with S. pneumoniae and concomitantly are treated with antagonist anti-TREM2 antibodies every other day starting from day 0. The first dose of anti-TREM2 antibodies is administered 3 hours prior to challenge with S. pneumonia. Mice are monitored daily for 15 days to check for death events. % of mice surviving bacteria challenge is determined. In separate experiments, count of bacterial load and cytokine expression in the blood and in the lungs is also determined. 24 or 48 hours after infection blood is collected in EDTA-containing tubes and plated on agar plates to enumerate bacterial CFU in the plasma. Plasma is stored at −20° C. for cytokine analysis by ELISA. Lungs are harvested, homogenized and plated on agar plates to enumerate bacterial CFU, or incubated for 30 min in lysis buffer and supernatants analyzed for cytokine measurements. In separate experiments, lungs are collected 40 hours post bacterial infection, fixed in 10% formalin, and embedded in paraffin for H&E pathology analysis.

### Example 51: Analysis of the Protective Effect of TREM2 Antibodies in Sepsis

[0751] To evaluate the ability of TREM2 antibodies to delay, prevent, or treat sepsis, a preclinical mouse model involving systemic challenge of C57B16 mice with LPS is used. This model involves intraperitoneal (i.p.) administration of 37 mg/ml LPS as described (see, e.g., Gawish R et al, 2014 FASEB J). In this model >95% WT C57B16 mice succumb infection within 40 hours post LPS injection. Cohorts of mice are challenged with LPS and concomitantly are treated with antagonist anti-TREM2 antibodies every day starting from day 0. The first dose of anti-TREM2 antibodies is administered 3 hours prior to challenge with LPS. Mice are monitored every ˜4 hours during daytime, to check for death events. Percentage of mice surviving LPS challenge is determined.

[0752] In separate experiments, peritoneal lavage fluid (PLF) is collected. Supernatants are stored at −20° C. for cytokine analysis by ELISA; pelleted cells are counted to quantify inflammatory cells recruited in the peritoneal cavity. Similar studies can be conducted to test the efficacy of TREM2 antibodies in other models of infection (see, e.g., Sun et al., (2013) Invest Ophthalmol Vis Sci. 17; 54(5):3451-62).

### Example 52: Analysis of the Protective Effect of TREM2 Antibodies in Acute and Chronic Colitis

[0753] To evaluate the ability of anti-TREM2 antibodies to delay, prevent, or treat colitis, preclinical mouse models of acute or chronic colitis are used. For DSS-induced colitis, mice receive 3% DSS in drinking water ad libitum for 8 days. For TNBS-induced colitis, mice are anesthetized and treated with an intra-rectal injection of 3 rng TNBS in 20% ethanol (vol/vol) or vehicle alone as a control. For the chronic colitis model, all mice are treated with 3 cycles of 2% DSS for 5 days, followed by a 10-day recovery period. For all models, weight loss, stool consistency, and presence of fecal occult blood are monitored daily and used to calculate the disease activity index, as described (see, e.g., Correale C, 2013, Gastroenterology, February 2013, pp. 346-356.e3). Cohorts of mice are treated with antagonist anti-TREM2 antibodies every day starting from day 0 and subjected to DSS or TNBS administration. Mice are monitored every day, to check for weight loss, stool consistency, and presence of fecal occult blood were monitored daily and used to calculate the disease activity index, as described (see, e.g., S. Vetrano, (astroenterology, 135 (2008), pp. 173-184). In separate experiments, endoscopic and histological images of mucosal damage are collected to evaluate inflammatory cell infiltration and mucosal damage. Similar studies can be conducted to test the benefit of TREM2 antibodies in other models of autoimmunity including Crolin's disease, inflammatory bowel disease, and ulcerative colitis (see, e.g., Low et al., (2013) Drug Des Devel Ther.; 7: 1341-1357; and Said et al., (2008) PLoS Med 5(9): e198).

### Example 53: Analysis of the Protective Effect of Agonist TREM2 in Wound Healing

[0754] To evaluate the ability of anti-TREM2 antibodies to increase colonic wound repair following injury, a mouse model of biopsy injury in the colon is used. In this model, the endoscope with outer operating sheath is inserted to the mid-descending colon and the mucosa is surveyed to the ano-rectal junction. Then, a single full thickness area of the entire mucosa and submucosa is removed with flexible biopsy forceps with a diameter of 3 French, avoiding penetration of the muscularis propria. Each mouse is biopsy injured at 3-5 sites along the dorsal side of the colon (see. e.g., Seno H, 2008, Proc Natl Acad Sci USA. 2009 Jan. 6; 106(1): 256-261). Cohorts of mice are treated with agonist anti-TREM2 antibodies 2 or 3 days after biopsy injury. Mice are monitored every day for 15 days, to check for weight loss and wound healing by measuring the surface area of lesions.

### Example 54: Analysis of the Protective Effect of TREM2 Antibodies in Retinal Degeneration

[0755] AMD is a degenerative disease of the outer retina. It is thought that inflammation, particularly inflammatory cytokines and macrophages, contribute to AMD disease progression. The presence of macrophages in the proximity of AMD lesions is documented, in the drusen, Bruch's membrane, choroid and retina. Macrophages release tissue factor (TF) and vascular endothelial growth factor (VEGF), which triggers the expansion of new blood vessels formation in patients showing choroidal neovasulcarization. The type of macrophage present in the macular choroid changes with age, displaying elevated levels of M2 macrophages in older eyes compared to younger eyes. However, advanced AMD maculae had higher M1 to M2 rations compared to normal autopsied eyes of similar age. (see, e.g., Cao X et al, (2011), Pathol Int 61(9): pp 528-35). This suggests a link between classical M1 macrophage activation in the eye in the late onset of AMD progression. Retinal microglia cells are tissue-resident macrophages that are also normally present in the inner retina. In the event of damage, microglia can be activated and act as mediator of inflammation. Activated microglia has been detected in the AMD tissue samples and has been proposed as one potential contributor of inflammatory processed that lead to AMD pathogenesis (Gupta et al., (2003) Exp Eye Res., 76(4):463-71.). The ability of antagonist TREM2 antibodies to prevent, delay, or reverse AMD is tested in one or more of AMD models (see, e.g., Pennesi et al., (2012) Mol Aspects Med.; 33(4): 487-509). Overall inflammatory macrophages (either M1 and/or activated microglia) are documented to correlate with AMD disease progression and therefore represent a therapeutic target for antagonist TREM2 antibodies. Similar therapeutic benefit can be achieved in glaucoma and genetic forms or retinal degeneration such as retinitis pigmentosa.

[0756] The ability of TREM2 antibodies to prevent, delay, or reverse retinal ganglion cell degeneration in glaucoma is tested in a glaucoma model (see, e.g., El-Danaf et al., (2015). J Neurosci. 11; 35(6):2329-43). Likewise, the therapeutic benefit of REM2 in genetically induced retinal degeneration and retinitis pigmentosa is tested as described in Chang et al., (2002) Vision Res.; 42(4):517-25, and in “Retinal Degeneration Rat Model Resource Availability of P23H and S334ter Mutant Rhodopsin Transgenic Rats and RCS Inbred and RCS Congenic Strains of Rats,” MM LaVail, Jun. 30, 2011.

### Example 55: Analysis of the Protective Effect of TREM2 Antibodies in Adipogenesis and Diet-Induced Obesity

[0757] To test the effect of TREM2 antibodies in adipogenesis and obesity, a mouse model of high-fat diet (HFD) is used (see, e.g., Park et al., (2015) Diabetes. 64(1):117-27).

### Example 56: Analysis of the Protective Effect of TREM2 Antibodies in Malaria

[0758] TREM2 expression in the nonparenchymal liver cells closely correlates with resistance to liver stage infection with the malaria agent Plasmodium berghei (Gonsalves et al., (2013) Proc Natl Acad Sci 26; 110(48):19531-6). Without wishing to be bound to theory, it is believed that TREM2 antibodies increase resistence to liver stage infection with P. berghei. The ability of TREM2 antibodies to increase resistance to malaria infection is tested as described in Gonçalves et al., (2013) Proc Natl Acad Sci 26; 110(48):19531-6. Briefly, GFP-expressing P. berghei ANKA sporozoites are obtained by dissection of infected salivary glands from Anopheles stephensi mosquitoes. Sporozoite suspensions in RPMI medium are injected i.v. in 100 μL of inocula containing 10⁴ sporozoites per mouse. Livers are collected at 40 h after injection or survival, and parasitemia is followed for 28 days. For experimental cerebral malaria scoring, neurologic symptoms are monitored from day 5 after injection.

### Example 57: Analysis of the Protective Effect of TREM2 Antibodies in Osteoporosis

[0759] Bone is a dynamic organ constantly remodeled to support calcium homeostasis and structural needs. The osteoclast is the cell responsible for removing both the organic and inorganic components of bone. The osteoclast is derived from hematopoietic progenitors in the macrophage lineage and differentiates in response to the tumor necrosis factor family cytokine receptor activators of NFκB ligand. Osteoclasts, the only bone-resorbing cells, are central to the pathogenesis of osteoporosis and osteopetrosis (Novack et al., (2008) Annual Rev Pathol., 3:457-84). Osteoporosis is a progressive bone disease that is characterized by a decrease in bone mass and density which can lead to an increased risk of fracture. It is mostly manifested in the first years following menopause, when bone turnover is accelerated, with increased activity of both osteoclasts and osteoblasts. Owing to an imbalance in the processes of resorption and synthesis, however, the net effect is bone loss, which is largely trabecular. Thus, the most prevalent sites of fracture in osteoporosis are the wrist, femoral neck, and vertebral bodies, in which the trabecular structure is key to overall bone strength. Accelerated osteoclast differentiation and increased bone resorption capacity, resulting in osteoporosis have been described in animal models lacking the expression of TREM2 (Otero et al (2012) J. Immunol. 188, 2612-2621). Reduced osteoclast function results in osteopetrosis, with increased bone mass and elimination of bone marrow space, as observed in animal models lacking DAP12 ITAM signaling adapter and resulting in a significant defect in differentiation of osteoclast-like cells (Koga, et al., (2004) Nature 428: 758-763). Without wishing to be bound by theory, it is believed that administering an anti-TREM2 antibody of the present disclosure can prevent, reduce the risk of, and/or treat osteoporosis. In some embodiments, administering an agonist anti-TREM2 antibody may induce one or more TREM2 activities in an individual having osteopetrosis (e.g., DAP12 phosphorylation, Syk activation, and accelerated differentiation into osteoclasts) (Peng et al (2010). Sci Signal. 2010 18; 3 122; and Humphrey et al., (2006) J Bone Miner Res., 21(2):237-45).

### Example 58: Analysis of the Effect of Anti-TREM2 Antibodies in Mouse Models of Spinal Cord Injury

[0760] A total of 20 C57/BL6 mice were used in 2 groups of 10 mice each. Spinal cord injury (SCI) was induced according to Han et al., Brain 2010, 133:1026-42. Briefly, the mice were anaesthetized and their backs shaved and cleansed with Betadine (Purdue Products LP). After a midline incision and laminectomy of the T9 vertebra, spinal cord contusions were induced using the Infinite Horizon Impactor with the force set at 50 kilodyne (PSI, Lexington, Ky.). The vertebral column was stabilized in a frame with rigid steel clamps inserted under the transverse processes. Only mice with injury displacements of 400-800 □m were included. After the injury, the muscles were closed in layers, the skin incision was closed and Bacitracin zinc antibiotic (Altana, Melville, N.Y.) was applied on the incision area.

[0761] Animals were tested for locomotion until 6 weeks after injury. Anti-TREM2 antibody 7E5 and isotype control antibody (control IgG) were injected at 80 mg/kg once per week intraperitoneally, including one pre-injury injection 24 h prior to SCI induction.

[0762] To test motor skills, hindlimb performance in stepping, limb coordination, and trunk stability was tested on a 10-point scale, called the Basso Mouse Scale (Basso et al., J Neurotrauma 2006, 23:635-59). Basso Mouse Scale (BMS) scores of 0-2 involve hindlimb paralysis; 3-4 some ankle movement; 5-6 weight-bearing with some coordination and stepping; 7-9 high functioning with consistent coordinated stepping; and where 9 is normal. BMS subscores are calculated when mice have a score of 5 and over (weight bearing). These represent fine motor skills including frequency of plantar stepping, interlimb coordination, paw position during stepping, as well as trunk stability and tail positioning during locomotion. The subscore can reveal differences between groups when the BMS is the same. BMS was performed before and 24 hr after the first injection, and every week after that, again 24 hr after the weekly injections.

[0763] The results in FIGS. 22A and 22B show that treatment with the anti-TREM2 antibody 7E5 significantly, but transiently, improved BMS scores on days 7 and 10. The results may be due to a differential effect of microglial function on tissue recovery after injury.

### Example 59: Analysis of the Ability of TREM2 Antibodies to Affect Survival of Human Dendritic Cells In Vitro

[0764] Monocytes from peripheral blood mononuclear cells were isolated using RosetteSep™ human monocyte enrichment cocktail (Stem Cell Technoclogies) according to manufacturer's manual. Monocytes were cultured at 1×10⁶ cells/ml in complete RPMI media (10% FCS, Pen/Strep, L-Glutamine, MEM non-essential Amino Acid, Sodium Pyruvate, 1 mM HEPES) in the presence of 100 ng/ml hGM-CSF and 100 ng/ml hIL-4 for 7 days. Human dendritic cells were plated at 25,000 cells per well in a 96-well, non-tissue culture treated plate. Various concentrations of anti-TREM2 antibody 9F5 or 10 Kg/ml of anti-TREM2 antibody 10A9 was added in the presence of 20 ng/ml of hGM-CSF and 20 ng/ml of hIL-4. Mouse IgG1 isotype control antibody and media alone (no addition) were used as a control. After 3 days, cell viability was analyzed using a CellTiter-Glo® (Promega) according to manufacturer's protocol.

[0765] Human monocyte-derived dendritic cells were incubated for three days with either anti-TREM2 antibody 9F5 or 10A9. While incubation with 10 μg/ml of antibody 10A9 decreased cell survival to 60%, 10 μg/ml of antibody 9F5 did not significantly affect cell survival (FIG. 23).

### Example 60: TREM2 Antibodies Show Brain or CSF Levels at Above 1% of Peripheral Concentrations

[0766] Groups of wild-type (WT) or 5XFAD mice are chronically treated with anti-TREM2 antibody or control antibody for between four to twelve weeks by intraperitoneal weekly injection. Plasma is collected weekly. At the end of the study, mice are anesthetized with 3-5% isoflurane/oxygen mixture until unconscious and unresponsive to withdrawal reflex. The isoflurane/oxygen mixture is maintained throughout the procedure by delivery through a nose cone. Mice are placed on their back and an incision is made through the abdomen and diaphragm exposing the heart. The right atrium is cut to allow the blood to escape and 20-30 ml of sterile saline is injected by syringe and 25 gauge needle into the left ventricle. The saline is delivered at a slow, even pace until all of the blood had been removed and the liver appears blanched. The brain is then removed from the skull and placed in a sterile petri dish under a dissecting microscope. The cerebellum, midbrain, and hindbrain are removed and the brain is divided into two hemispheres by cutting through the midline. Both hippocampus and frontal cortex are collected and snap frozen. Brain lysates are prepared using ice cold N-Per (Thermo Fisher) with protease inhibitors according to manufacturer's instructions. Protein concentration in the lysates is measured using a BCA assay (Thermo Fisher). Antibody levels in blood plasma and brain lysates are measured using a custom IgG Meso Scale Discovery assay and IgG concentrations are used to measure percent brain concentration of antibodies.

### Example 61: TREM2 Antibodies Ameliorate Pathology in a Mouse Model of Chronic Colitis

### Materials and Methods

[0767] Seven week-old female C57BL/6 mice were subjected to the following dextran sodium sulfate (DSS) protocol. The experimenters were blinded and antibody solutions of either anti-TREM antibody 7E5 or control antibody MOPC-21 were intraperitoneally (IP) injected into the mice starting at day −3 before the first DSS cycle, and then twice per week for the entire experiment at a concentration of 40 mg/kg. After 3 days, mice were subjected to three oral cycles (7 days) of 1.5% DSS (molecular mass 40 kDa, MP Biomedicals, cat n° 160110, Lot n° Q1408), each followed by cycles of regular water (7 days). Severity of acute and chronic colitis was scored twice per week, using a disease activity index (DAI) score based on evaluation of body weight, diarrhea and presence of blood in stools. DAI was determined by scoring changes in: weight loss (0=none; 1=1 to 5%; 2 =5 to 10%; 3=10 to 20%; 4=>20%); stool consistency (0=normal; 2=loose; 4=diarrhea); and rectal bleeding (0=normal; 2=occult bleeding; 4=gross bleeding) to obtain a five grade (0-4) DAI.

[0768] Surviving mice were sacrificed at day 35, after blood serum collection and colon endoscopy. In addition, after measurement of colon length, half of the tissue was formalin-fixed and included in paraffin for histological evaluation.

[0769] The colon endoscopy gives the opportunity to evaluate the severity of colitis with different parameters, such as thickening of the mucosa, bleeding, and sometimes a granular mucosa surface, loss of blood vessel structure, and the presence of fibrin. Based on these endoscopic signs of inflammation, at the end of the experiment, inflammation was scored also by endoscopy with the following system: thickening of the colon (score 0=transparent, 1=moderate, 2=marked, 3=non transparent), changes of the vascular pattern (score 0=normal, 1=moderate, 2=marked, 3=bleeding), visible Fibrin (0=none, 1=little, 2=marked, 3=extreme), granularity of the mucosal surface (0=none, 1=moderate, 2=marked, 3=extreme). All sub-scores are summed up to obtain an overall colon score of 0-12.

### Results

[0770] The dextran sodium sulfate (DSS) experimental model is the most widely used mouse model of colitis. DSS is a water-soluble, negatively charged sulfated polysaccharide with a highly variable molecular weight ranging from 5 to 1400 kDa. The mechanism by which DSS induces intestinal inflammation is thought to be the result of damage to the epithelial monolayer lining the large intestine, allowing the dissemination of pro-inflammatory intestinal contents (e.g., bacteria and their products) into underlying tissue. The distal and rectal parts are the most affected segments of the colon after this experimental protocol.

[0771] Mice treated with anti-TREM2 antibody 7E5 showed significantly reduced symptoms of inflammation after the first DSS cycle, as compared to mice treated with the control antibody. These results were also seen after the second and third DSS treatment (FIG. 24). Mice treated with anti-TREM2 antibody 7E5 showed a significant reduction in weight loss (FIG. 24A) and disease activity index (FIG. 24B) after the first DSS cycle and throughout the entire course of the study. At the end of the experiment, mice were sacrificed and the length of the colon was measured. Colon samples of mice injected with anti-TREM2 antibody 7E5 were significantly longer than colon samples of mice injected with the control antibody (FIG. 24C). This result further confirms that antibody 7E5 protects against DSS-induced colitis. Additionally, mice treated with anti-TREM2 antibody 7E5 showed a significantly lower endoscopic score, as compared to mice treated with the control antibody (FIG. 24D).

[0772] The results demostrate that treatment with an anti-TREM2 antibody significantly lowers symptoms of colitis in a chronic DSS mouse model. Moveover, these results indicate that anti-TREM2 antibodies, such as those of the present disclosure, could be used as a therapeutic for treting ulcerative colitis.

### Example 62: TREM2 Antibodies Show Activity in Humanized TREM2 Transgenic Mice

### Materials and Methods

[0773] To obtain mice expressing human TREM2 in the myeloid lineage, bacterial artificial chromosome (BAC) clones harboring TREM2, along with other TREM family members, and sufficient flanking sequences (at least 10 kb on either end) were identified. BAC clones harboring TREM gene loci were identified using the UCSC genome browser and the Clone DB at NCBI. Criteria were to identify clones with a minimum of 10 KB of flanking 5′ and 3′ sequences in addition to the genes of interest, to maximize the likelihood of appropriate gene expression.

[0774] BAC clones were obtained from Invitrogen as bacterial stab cultures. The cultures were grown and DNA was isolated using standard techniques. Agarose Gel electrophoresis after restriction digestion confirmed size and intactness of inserts, based on comparison with sequences of the UCSC genome browser. Additionally, sequences for BAC clones were queried at Clone DB at the NCBI web portal. which includes sequences for the ends of each BAC, as well as relevant human single nucleotide polymorphisms of interest.

[0775] Based on the above strategy, BAC clone CTD-3222A20 was identified. This clone contains the complete sequences of the human TREM2, human TREML2, human TREM1, human TREML1, and human TREML4 genes. As the TREM family of genes is found within a cluster on chromosome 6, a contiguous region covered by this BAC, from nucleotide 41104901-41292419, based on hg38 build of UCSC, spanning 187,519 nucleotides, included all of the genes.

[0776] Transgenic mice harboring BAC clone CTD-3222A20 were generated by injection of purified BAC DNA into C57BL6/j mouse zygotes utilizing standard pronuclear injection techniques. Zygotes were implanted into female mice. Pups from the implanted mice were then genotyped for the presence of the transgene. These founder mice were then bred to non-transgenic mice and the progeny were screened for appropriate expression of the transgenes. Briefly, blood was obtained from 4-8 week old mice, and monocytes were isolated using standard techniques. The monocytes were then analyzed by FACS using antibodies specific for each of the transgenes (i.e., TREM2, TREM1, and TREML2). Expression was confirmed for these genes.

[0777] For the experiments, either wild-type muce (WT) or humanize TREM2 BAC Trangenic mice (huTREM2 Tg or Bac-Tg) were intraperitoneally (IP) injected with 3% thioglycollate.

[0778] On day 4, peritoneal cells were collected from each mouse. In parallel, bone marrow was harvested to generate bone-marrow-derived macrophages according to standard procedures. To measure cytokine production upon stimulation of thioglycollate-induced macrophages, cells were incubated for about 60 hr on plates coated with either anti-TREM2 antibody 9F5 or control mouse antibody MOPC-21. TNF-alpha secreted in the supernatant was measured by cytometric bead array (CBA, BD Biosciences).

[0779] To examine expression of human vs. mouse TREM2 in WT vs. huTREM2 Tg mice, thioglycollate-induced macrophages were collected and stained with human TREM2-specific antibodies 9F5 or 10A9, with mouse TREM2-specific antibody 2F5, or with an anti-TREM2 antibody that recognizes both human and mouse TREM2 (R&D rat anti-TREM2) using standard cell staining protocols. Cells were analyzed with a FACS Canto and the live cell population was gated on CD11b+ and F4/80+. Raw data was analyzed by FlowJo.

[0780] For in vitro stimulation of bone marrow-derived macrophages from either WT or huTREM2 Tg mice, 10×10⁶ cells were either left unstimulated or stimulated with anti-TREM2 antibodu 9F5 or control antibody MOPC-21. Cells were then lysed and immunoprecipitated with rat anti-TREM2 antibody (R&D Systems). Samples were run on SDS-gels under non-reducing conditions and a Western immunoblot was performed with anti-phospho-tyrosine (Millipore) and anti-DAP12 antibodies (Cell signaling) using standard procedures.

### Results

[0781] FIG. 25A shows that human TREM2 BAC transgenic mice express human TREM2, as there is positive TREM2 binding on thioglycollate-induced macrophages by both human specific anti-TREM2 antibodies 9F5 and 10A9, but these antibodies show no binding to WT macrophages that only express mouse TREM2.

[0782] Stimulating thioglycollate-induced macrophages from human TREM2 BAC transgenic mice in vitro with plate-bound anti-TREM2 antibody 9F5 for about 60 hr induced a significant increase in TNF-alpha secretion (FIG. 25B). In contrast, antibody 9F5 did not have an effect on thioglycollate-induced macrophages from WT mice.

[0783] Additionally, stimulating bone marrow-derived macrophages from human TREM2 BAC transgenic mice in vitro with anti-TREM2 antibody 9F5 induced Dap12 phosphorylation, while this effect was not observed with the control antibody (FIG. 25C).

[0784] The results in FIG. 25 indicate that anti-TREM2 antibody 9F5 can engage human TREM2 and induce TREM2-mediated signaling.

### Example 63: TREM2 Antibodies do not Bind Soluble TREM2 In Vivo

### Materials and Methods

[0785] Transgenic BAC mice expressing human TREM2 in the myeloid lineage were generated as described in Example 62.

[0786] Human TREM2 BAC transgenic mice (huTREM2 Tg) or wild-type mice (WT) were injected intraperitoneally with anti-TREM2 antibody 9F5, anti-TREM2 antibody T21-9, or isotype control mouse IgG1 antibody at 20 mg/kg (n=3 animals/group). Plasma samples were collected two days after the injection using standard procedures. Soluble TREM2 in plasma from either WT or TREM2 BAC transgenic mice was detected using a custom ELISA that specifically detects human TREM2. Briefly, 100 ul of 2 ug/ml human TREM2 specific capture antibody (8F11, msIgG) in PBS was incubated on high bind 96-well ELISA plates overnight at 4° C. The next day, plates were washed three times with 300 ul wash buffer (PBS+0.05% Tween) and 300 ul binding buffer (PBS+1% BSA) was added and incubated at room temperature (RT) for at least one hour. Plasma samples and standard (recombinant human TREM2-FC, R&D Systems) were diluted in binding buffer, added to the plate and incubated for 1 hour at RT. Then plates were washed again as before and biotinylated detection antibody (goat anti-human TREM2, R&D Systems) was added at 1:2000 dilution in binding buffer and incubated for 1h at RT. Plates were washed again and incubated with Streptavidin-HRP at 1:200 diluted in binding buffer for 20 min at RT. Plates were washed again and TMB substrate was added and incubated until color developed. The reaction was stopped upon addition of 2N sulfuric acid and plates were read on a BioTek Synergy™ H1 plate reader.

[0787] To test whether anti-TREM2 antibody 9F5 can bind to soluble TREM2 in plasma, a modified ELISA setup was tested. Plates were coated with 100 ul of a 2 ug/ml solution of 9F5, T21-9 or control IgG antibody in PBS overnight at 4° C. The next day, plates were washed three times with 300 ul wash buffer (PBS+0.05% Tween), and 300 ul binding buffer (PBS+1% BSA) was added and incubated at room temperature (RT) for at least one hour. Plasma samples from untreated TREM2 BAC transgenic mice were diluted in binding buffer, added to the plate and incubated for 1 hour at RT. Then plates were washed again as before and biotinylated detection antibody (goat anti-human TREM2, R&D Systems or rat anti-hu/ms TREM2, R&D Systems) was added at 1:2000 (for goat IgG) or 1:10,000 (for rat IgG) in binding buffer and incubated for 1 hr at RT. Plates were washed again and incubated with Streptavidin-HRP at 1:200 diluted in binding buffer for 20 min at RT. Plates were washed again and TMB substrate was added and incubated until color developed. The reaction was stopped upon addition of 2N sulfuric acid and plates were read on a BioTek Synergy™ H1 plate reader.

### Results

[0788] The results from the ELISA assay show that injection of T21-9 TREM2 antibody causes a highly significant increase in levels of soluble human TREM2 in plasma, while injection of antibody 9F5 does note increase levels of soluble human TREM2 in plasma (FIG. 26A). The ELISA could not detect any soluble TREM2 in WT mice that do not express human TREM2, confirming that the ELISA is specific for human TREM2 and does not recognize mouse TREM2. These results indicate that, in contrast to antibody T21-9, antibody 9F5 is not able to increase levels of soluble TREM2 in vivo.

[0789] It was hypothesized that antibody 9F5 may have failed to increase levels of soluble TREM2 in plasma because the antibody is not able to bind soluble TREM2. Antibody 9F5 was plated on ELISA plates to determine whether that antibody can capture endogenous soluble TREM2 from plasma. Again, in contrast to T21-9 which shows binding to solubleTREM2, antibody 9F5 only showed weak binding to soluble TREM2 (FIG. 26B). These results indicate that antibody 9F5 can only weakly bind to soluble TREM2 in plasma, which explains the inability of antibody 9F5 to increase soluble TREM2 in vivo.

[0790] In summary, the results indicate that antibody 9F5 cannot significantly bind to soluble TREM2 in vivo. This may be advantageous, as soluble TREM2 is thought to be an inactive version of the TREM2 receptor that can scavenge TREM2 antibodies, making them unable to bind to cellular TREM2, and thus lowering efficacy of TREM2 antibodies.

The application's sequence listing, which the Patent Office published only in electronic form, follows.

SEQUENCE LISTING (888 sequences)

SEQ ID NO: 1 - protein, 230 aa, Homo sapiens
MEPLRLLILLFVTELSGAHNTTVFQGVAGQSLQVSCPYDSMKHWGRRKAWCRQLGEKGPCQRVVSTHNLWLLSFLRRWNGSTAITDDTLGGTLTITLRNLQPHDAGLYQCQSLHGSEADTLRKVLVEVLADPLDHRDAGDLWFPGESESFEDAHVEHSISRSLLEGEIPFPPTSILLLLACIFLIKILAASALWAAAWHGQKPGTHPPSELDCGHDPGYQLQTLPGLRDT

SEQ ID NO: 2 - protein, 227 aa, Mus musculus
MGPLHQFLLLLITALSQALNTTVLQGMAGQSLRVSCTYDALKHWGRRKAWCRQLGEEGPCQRVVSTHGVWLLAFLKKRNGSTVIADDTLAGTVTITLKNLQAGDAGLYQCQSLRGREAEVLQKVLVEVLEDPLDDQDAGDLWVPEESSSFEGAQVEHSTSRNQETSFPPTSILLLLACVLLSKFLAASILWAVARGRQKPGTPVVRGLDCGQDAGHQLQILTGPGGT

SEQ ID NO: 3 - protein, 228 aa, Rattus norvegicus
MEPLHVFVLLLVTELSQALNTTVLQGVAGQSLRVSCTYDALRHWGRRKAWCRQLAEEGPCQRVVSTHGVWLLAFLRKQNGSTVITDDTLAGTVTITLRNLQAGDAGLYQCQSLRGREAEVLQKVVVEVLEDPLDDQDAGDLWVPEESESFEGAQVEHSTSSQVSSCGSPLTYHLPPKEPIRKDLLPTHFHSSPPGLCPPEQASYSQHPLGCGQGQAEAGDTCGQWARL

SEQ ID NO: 4 - protein, 260 aa, Macaca mulatta
MPDPLFSAVQGKDKILHKALCICPWPGKGGMEPLRLLILLFATELSGAHNTTVFQGVEGQSLQVSCPYDSMKHWGRRKAWCRQLGEKGPCQRVVSTHNLWLLSFLRRRNGSTAITDDTLGGTLTITLRNLQPHDAGFYQCQSLHGSEADTLRKVLVEVLADPLDHRDAGDLWVPGESESFEDAHVEHSISRSLLEGEIPFPPTSVLLLLACIFLIKILAASALWAAAWHGQKPGTHPPSEPDCGHDPGHQLQTLPGLRDT

SEQ ID NO: 5 - protein, 230 aa, Bos taurus
MEPVVLLILLAVTELSRAHNTTVFQGMMGRSLRVSCPYNSLKHWGRRKAWCRQLGEEGLCQQVVSTHPSWLLSFLKRRNGSTAITDDALGGTLTITLRNLQTHDAGLYQCQSLHGSEADTLRKVLVEVLADPRDYQDPGDLWIPEGSESFENAQVEHSISRSLSEEESPFPPTSILFLLACIFLSKLLAASALWAAAWHGQKQRPPQASGPDCGHNPGYQLQTLTELRDV

SEQ ID NO: 6 - protein, 230 aa, Equus caballus
MEPLPLLILLSVAELSRGHNTTVFQGTAGRSLKVSCPYNSLMHWGRRKAWCRQLGEDGPCQQVVSTHSLWLLSFLKRRNGSTVITDDALGGILTITLRNLQAHDAGFYQCQSLHGGEADTLRKVLVEVLADPLDHQEPGDLWIPKESESFEDAQVEHSISRSLVEEEIPSLPTSILLLLACIFLSKLLAASAIWAAAWHGQKQETPPASEPDRGHDPGYQLHTLTGERDT

SEQ ID NO: 7 - protein, 233 aa, Sus domesticus
METLGLLLLLWVAELSRAHNTSVFQGTAGQSLRVSCSYNSLKHWGRRKAWCRQLSEEGLCQHVVSTHPTWLLSFLKRRNGSTAITDDALGGTLTITLRNLQAHDAGLYQCQSLHGSEADTLKKVLVEVLADPLESQSKSFQDVQMEHSISRNLSEESLFPPTSTLFLLACVFLSKLLVASALWAAAWHGHKQRTSPAGGLDCGRDPGDQDQTLTDELGESSDQDQTLTELRDT

SEQ ID NO: 8 - protein, 230 aa, Canis familiaris
MEPLWLLILLAVTELSGAHNTTVFQGMAGRSLQVSCPYNSLKHWGRRKAWCRQVDKEGPCQRVVSTHRSWLLSFLKRWNGSTAIVDDALGGTLTITLRNLQAHDAGLYQCQSLYGDEADTLRKVLVEVLADPLDHLDPGDLWIPEESKGFEDAHVEPSVSRSLSEEEIPFPPTSILFLLACIFLSKFLAASALWAAAWRGQKLGTPQASELDCSCDPGYQLQTLTEPRDM

SEQ ID NO: 9 - protein, 11 aa, Artificial Sequence
  Synthetic Construct
RASENIYSFLA

SEQ ID NO: 10 - protein, 17 aa, Artificial Sequence
  Synthetic Construct
KSSQSLLYSSNQKNCLA

SEQ ID NO: 11 - protein, 16 aa, Artificial Sequence
  Synthetic Construct
KSSQSLLYSNGKTFLS

SEQ ID NO: 12 - protein, 16 aa, Artificial Sequence
  Synthetic Construct
KSSQSLLDSDGKTYLN

SEQ ID NO: 13 - protein, 10 aa, Artificial Sequence
  Synthetic Construct
SASSSVSYMY

SEQ ID NO: 14 - protein, 16 aa, Artificial Sequence
  Synthetic Construct
RSSQSLVHSNGNTYLH

SEQ ID NO: 15 - protein, 16 aa, Artificial Sequence
  Synthetic Construct
RSSQTIIHSNGNTYLE

SEQ ID NO: 16 - protein, 17 aa, Artificial Sequence
  Synthetic Construct
KSSQSLLYSSDQKNYLA

SEQ ID NO: 17 - protein, 11 aa, Artificial Sequence
  Synthetic Construct
RASENIYSYLA

SEQ ID NO: 18 - protein, 11 aa, Artificial Sequence
  Synthetic Construct
RTSENVYSNLA

SEQ ID NO: 19 - protein, 16 aa, Artificial Sequence
  Synthetic Construct
RSSQSLVHSNGYTYLH

SEQ ID NO: 20 - protein, 16 aa, Artificial Sequence
  Synthetic Construct
RFSQSLVHSNGNTYLH

SEQ ID NO: 21 - protein, 10 aa, Artificial Sequence
  Synthetic Construct
KASSNVNYMS

SEQ ID NO: 22 - protein, 17 aa, Artificial Sequence
  Synthetic Construct
KSSQSLLNSGNQKKYLT

SEQ ID NO: 23 - protein, 17 aa, Artificial Sequence
  Synthetic Construct
KSSQSLLYSGNQKNFLA

SEQ ID NO: 24 - protein, 7 aa, Artificial Sequence
  Synthetic Construct
NSKTFAE

SEQ ID NO: 25 - protein, 7 aa, Artificial Sequence
  Synthetic Construct
WAFTRES

SEQ ID NO: 26 - protein, 7 aa, Artificial Sequence
  Synthetic Construct
LVSKLDS

SEQ ID NO: 27 - protein, 7 aa, Artificial Sequence
  Synthetic Construct
LTSILAS

SEQ ID NO: 28 - protein, 7 aa, Artificial Sequence
  Synthetic Construct
KVSNRFS

SEQ ID NO: 29 - protein, 7 aa, Artificial Sequence
  Synthetic Construct
WASTRES

SEQ ID NO: 30 - protein, 7 aa, Artificial Sequence
  Synthetic Construct
KAKTLAE

SEQ ID NO: 31 - protein, 7 aa, Artificial Sequence
  Synthetic Construct
AATNLAD

SEQ ID NO: 32 - protein, 7 aa, Artificial Sequence
  Synthetic Construct
FTSNLPS

SEQ ID NO: 33 - protein, 7 aa, Artificial Sequence
  Synthetic Construct
KVSNRFC

SEQ ID NO: 34 - protein, 10 aa, Artificial Sequence
  Synthetic Construct
QHHYGTPPWT

SEQ ID NO: 35 - protein, 9 aa, Artificial Sequence
  Synthetic Construct
QQYYSYPLT

SEQ ID NO: 36 - protein, 9 aa, Artificial Sequence
  Synthetic Construct
MQGTHFPLT

SEQ ID NO: 37 - protein, 9 aa, Artificial Sequence
  Synthetic Construct
WQGTHFPYT

SEQ ID NO: 38 - protein, 9 aa, Artificial Sequence
  Synthetic Construct
QQWSFNPYT

SEQ ID NO: 39 - protein, 9 aa, Artificial Sequence
  Synthetic Construct
SQSTHVPLT

SEQ ID NO: 40 - protein, 9 aa, Artificial Sequence
  Synthetic Construct
FQGSHVPYT

SEQ ID NO: 41 - protein, 9 aa, Artificial Sequence
  Synthetic Construct
QHHYGTPFT

SEQ ID NO: 42 - protein, 9 aa, Artificial Sequence
  Synthetic Construct
HHFWGTPYT

SEQ ID NO: 43 - protein, 9 aa, Artificial Sequence
  Synthetic Construct
SQSTRVPYT

SEQ ID NO: 44 - protein, 9 aa, Artificial Sequence
  Synthetic Construct
SQSTRVPPT

SEQ ID NO: 45 - protein, 8 aa, Artificial Sequence
  Synthetic Construct
SGEVTQFT

SEQ ID NO: 46 - protein, 9 aa, Artificial Sequence
  Synthetic Construct
QNDYGFPLT

SEQ ID NO: 47 - protein, 9 aa, Artificial Sequence
  Synthetic Construct
QQYYSYPFT

SEQ ID NO: 48 - protein, 9 aa, Artificial Sequence
  Synthetic Construct
FTLSSYAMS

SEQ ID NO: 49 - protein, 9 aa, Artificial Sequence
  Synthetic Construct
YTFTEYTMH

SEQ ID NO: 50 - protein, 9 aa, Artificial Sequence
  Synthetic Construct
YTFTDYEMH

SEQ ID NO: 51 - protein, 9 aa, Artificial Sequence
  Synthetic Construct
FTFSDAWMG

SEQ ID NO: 52 - protein, 9 aa, Artificial Sequence
  Synthetic Construct
FSFNTYAMN

SEQ ID NO: 53 - protein, 9 aa, Artificial Sequence
  Synthetic Construct
YTVSRYWMH

SEQ ID NO: 54 - protein, 9 aa, Artificial Sequence
  Synthetic Construct
YPFSNFWIT

SEQ ID NO: 55 - protein, 9 aa, Artificial Sequence
  Synthetic Construct
LTSNTYTQT

SEQ ID NO: 56 - protein, 9 aa, Artificial Sequence
  Synthetic Construct
FTFSDAWMD

SEQ ID NO: 57 - protein, 9 aa, Artificial Sequence
  Synthetic Construct
FTFNTYSMN

SEQ ID NO: 58 - protein, 9 aa, Artificial Sequence
  Synthetic Construct
YTFTTYWIH

SEQ ID NO: 59 - protein, 9 aa, Artificial Sequence
  Synthetic Construct
YAFSNYWMS

SEQ ID NO: 60 - protein, 9 aa, Artificial Sequence
  Synthetic Construct
YAFSSSWMN

SEQ ID NO: 61 - protein, 9 aa, Artificial Sequence
  Synthetic Construct
YIFTTYWIH

SEQ ID NO: 62 - protein, 9 aa, Artificial Sequence
  Synthetic Construct
FNFNTYAMK

SEQ ID NO: 63 - protein, 9 aa, Artificial Sequence
  Synthetic Construct
FNFNTYAMN

SEQ ID NO: 64 - protein, 9 aa, Artificial Sequence
  Synthetic Construct
YTFSDYYIH

SEQ ID NO: 65 - protein, 9 aa, Artificial Sequence
  Synthetic Construct
FRFNTYAMT

SEQ ID NO: 66 - protein, 13 aa, Artificial Sequence
  Synthetic Construct
VASISRGGSTYYP

SEQ ID NO: 67 - protein, 14 aa, Artificial Sequence
  Synthetic Construct
IGGINPNNGGTSYS

SEQ ID NO: 68 - protein, 14 aa, Artificial Sequence
  Synthetic Construct
IGVIDPETGGTAYN

SEQ ID NO: 69 - protein, 16 aa, Artificial Sequence
  Synthetic Construct
VAEIRDKVKNHATYYA

SEQ ID NO: 70 - protein, 16 aa, Artificial Sequence
  Synthetic Construct
IARIRSKSNNYATYYA

SEQ ID NO: 71 - protein, 14 aa, Artificial Sequence
  Synthetic Construct
IGRIDPNSGGTKYN

SEQ ID NO: 72 - protein, 14 aa, Artificial Sequence
  Synthetic Construct
IGDIYPGSDNSNYN

SEQ ID NO: 73 - protein, 16 aa, Artificial Sequence
  Synthetic Construct
ESVIRSKSNNFSTLYA

SEQ ID NO: 74 - protein, 16 aa, Artificial Sequence
  Synthetic Construct
VAEIRNKVNNHATYYA

SEQ ID NO: 75 - protein, 16 aa, Artificial Sequence
  Synthetic Construct
  VARIANT 8: Xaa = Glutamic acid or Glutamine
VAHIKTKXNNFATFYA

SEQ ID NO: 76 - protein, 14 aa, Artificial Sequence
  Synthetic Construct
IGRNDPNSGGSNYN

SEQ ID NO: 77 - protein, 14 aa, Artificial Sequence
  Synthetic Construct
IGQIYPGDGDTKYN

SEQ ID NO: 78 - protein, 14 aa, Artificial Sequence
  Synthetic Construct
IGRIYPGDGDTNYN

SEQ ID NO: 79 - protein, 14 aa, Artificial Sequence
  Synthetic Construct
IGRIDPNNGDTNYN

SEQ ID NO: 80 - protein, 16 aa, Artificial Sequence
  Synthetic Construct
IARIRSNSNDYATNYS

SEQ ID NO: 81 - protein, 14 aa, Artificial Sequence
  Synthetic Construct
IGDIYPGSDNRNFN

SEQ ID NO: 82 - protein, 16 aa, Artificial Sequence
  Synthetic Construct
VARIRSKSNNYATYYA

SEQ ID NO: 83 - protein, 14 aa, Artificial Sequence
  Synthetic Construct
IGYIYPNNGDNGYN

SEQ ID NO: 84 - protein, 16 aa, Artificial Sequence
  Synthetic Construct
EGVIRRKSSNFATLYA

SEQ ID NO: 85 - protein, 13 aa, Artificial Sequence
  Synthetic Construct
TRGYGYYRTPFAN

SEQ ID NO: 86 - protein, 12 aa, Artificial Sequence
  Synthetic Construct
ARGGSHYYAMDY

SEQ ID NO: 87 - protein, 18 aa, Artificial Sequence
  Synthetic Construct
TSPDYYGSSYPLYYAMDY

SEQ ID NO: 88 - protein, 7 aa, Artificial Sequence
  Synthetic Construct
RLGVFDY

SEQ ID NO: 89 - protein, 13 aa, Artificial Sequence
  Synthetic Construct
VRHGDGNLWYIDV

SEQ ID NO: 90 - protein, 9 aa, Artificial Sequence
  Synthetic Construct
VLTGTDFDY

SEQ ID NO: 91 - protein, 13 aa, Artificial Sequence
  Synthetic Construct
AREAYYTNPGFAY

SEQ ID NO: 92 - protein, 12 aa, Artificial Sequence
  Synthetic Construct
VRHKSNRYPGVY

SEQ ID NO: 93 - protein, 13 aa, Artificial Sequence
  Synthetic Construct
TSLYDGYYLRFAY

SEQ ID NO: 94 - protein, 12 aa, Artificial Sequence
  Synthetic Construct
  VARIANT 2, 4: Xaa = Glutamic acid or Glutamine
VXHXSNNYPFAY

SEQ ID NO: 95 - protein, 9 aa, Artificial Sequence
  Synthetic Construct
VRTNWDGDF

SEQ ID NO: 96 - protein, 19 aa, Artificial Sequence
  Synthetic Construct
SREKGADYYGSTYSAWFSY

SEQ ID NO: 97 - protein, 16 aa, Artificial Sequence
  Synthetic Construct
ARLLRNQPGESYAMDY

SEQ ID NO: 98 - protein, 9 aa, Artificial Sequence
  Synthetic Construct
VMTGTDFDY

SEQ ID NO: 99 - protein, 12 aa, Artificial Sequence
  Synthetic Construct
VGHKINNYPFAH

SEQ ID NO: 100 - protein, 13 aa, Artificial Sequence
  Synthetic Construct
VRHYSNYGWGFAY

SEQ ID NO: 101 - protein, 12 aa, Artificial Sequence
  Synthetic Construct
ARRGYYGGSYDY

SEQ ID NO: 102 - protein, 12 aa, Artificial Sequence
  Synthetic Construct
VRHKSNKYPFVY

SEQ ID NO: 103 - protein, 23 aa, Artificial Sequence
  Synthetic Construct
  VARIANT 3: Xaa = Glutamic acid or Glutamine
DIXVTQSPASLSASVGETVTITC

SEQ ID NO: 104 - protein, 21 aa, Artificial Sequence
  Synthetic Construct
TMSQSPSSLAVSVGEKVTMSC

SEQ ID NO: 105 - protein, 23 aa, Artificial Sequence
  Synthetic Construct
  VARIANT 3: Xaa = Glutamic acid or Glutamine
DVXMTQTPLTLSVTIGQPASISC

SEQ ID NO: 106 - protein, 21 aa, Artificial Sequence
  Synthetic Construct
VLTQSPALMSASPGEKVTMTC

SEQ ID NO: 107 - protein, 23 aa, Artificial Sequence
  Synthetic Construct
  VARIANT 3: Xaa = Glutamic acid or Glutamine
DVXMTQTPLSLPVSLGDQASISC

SEQ ID NO: 108 - protein, 21 aa, Artificial Sequence
  Synthetic Construct
  VARIANT 10: Xaa = Glutamic acid or Glutamine
VLTQSPAIMXASPGEKVTMTC

SEQ ID NO: 109 - protein, 22 aa, Artificial Sequence
  Synthetic Construct
NVLTQSPALMSASPGEKVTMTC

SEQ ID NO: 110 - protein, 23 aa, Artificial Sequence
  Synthetic Construct
DVVMTQTPLSLPVSLGDQASISC

SEQ ID NO: 111 - protein, 23 aa, Artificial Sequence
  Synthetic Construct
DVVMTQTPLTLSVTIGQPASISC

SEQ ID NO: 112 - protein, 22 aa, Artificial Sequence
  Synthetic Construct
ITMSQSPSSLAVSVGEKVTMSC

SEQ ID NO: 113 - protein, 21 aa, Artificial Sequence
  Synthetic Construct
  VARIANT 10, 12: Xaa = Glutamic acid or Glutamine
QMSQSPACLXAXVGESVTITC

SEQ ID NO: 114 - protein, 23 aa, Artificial Sequence
  Synthetic Construct
DIQMTQSPASLSVSVGETVTITC

SEQ ID NO: 115 - protein, 23 aa, Artificial Sequence
  Synthetic Construct
  VARIANT 3: Xaa = Glutamic acid or Glutamine
DVXMTQNPLSLPVSLGDQASISC

SEQ ID NO: 116 - protein, 23 aa, Artificial Sequence
  Synthetic Construct
DVLMTQTPLSLPVSLGDQASISC

SEQ ID NO: 117 - protein, 22 aa, Artificial Sequence
  Synthetic Construct
  VARIANT 13: Xaa = Glutamic acid or Glutamine
NVLTQSPALIWAXPGEKVTMTC

SEQ ID NO: 118 - protein, 23 aa, Artificial Sequence
  Synthetic Construct
  VARIANT 3: Xaa = Glutamic acid or Glutamine
DIXMTQSPSSLTVTAGEKVTMSC

SEQ ID NO: 119 - protein, 19 aa, Artificial Sequence
  Synthetic Construct
TQSPSSLAVSVGEKVTMTC

SEQ ID NO: 120 - protein, 15 aa, Artificial Sequence
  Synthetic Construct
WYQLKQGKSPQLLVY

SEQ ID NO: 121 - protein, 15 aa, Artificial Sequence
  Synthetic Construct
WYQQKPGQSPKLLIY

SEQ ID NO: 122 - protein, 15 aa, Artificial Sequence
  Synthetic Construct
WLLQRPGQSPKRLIY

SEQ ID NO: 123 - protein, 15 aa, Artificial Sequence
  Synthetic Construct
WYQQKPRSSPKPWIY

SEQ ID NO: 124 - protein, 15 aa, Artificial Sequence
  Synthetic Construct
WYLQKPGQSPKLLIY

SEQ ID NO: 125 - protein, 15 aa, Artificial Sequence
  Synthetic Construct
WYLRKPGQSPKLLIY

SEQ ID NO: 126 - protein, 15 aa, Artificial Sequence
  Synthetic Construct
WYQQKQGKSPKLVVY

SEQ ID NO: 127 - protein, 15 aa, Artificial Sequence
  Synthetic Construct
WYQQKQGKSPQLLVY

SEQ ID NO: 128 - protein, 15 aa, Artificial Sequence
  Synthetic Construct
  VARIANT 2, 3, 4: Xaa = Any Amino Acid
WXXXKPRSSPKPGIY

SEQ ID NO: 129 - protein, 15 aa, Artificial Sequence
  Synthetic Construct
  VARIANT 10: Xaa = Glutamic acid or Glutamine
WYQQKPGQPXKLLIY

SEQ ID NO: 130 - protein, 32 aa, Artificial Sequence
  Synthetic Construct
GVPSRFSGSGSGTQFSLRINSLQPEDFGSYYC

SEQ ID NO: 131 - protein, 32 aa, Artificial Sequence
  Synthetic Construct
GVPDRFTGSGSGTDFTLTISSVKAEDLAVYYC

SEQ ID NO: 132 - protein, 32 aa, Artificial Sequence
  Synthetic Construct
GVPDRFAGSGSGTDFTLKISRLEADDLGIYYC

SEQ ID NO: 133 - protein, 32 aa, Artificial Sequence
  Synthetic Construct
GVPDRFTGSGSGTDFTLKISRVEAEDLGVYYC

SEQ ID NO: 134 - protein, 32 aa, Artificial Sequence
  Synthetic Construct
GVPARFSGSGSGTSYSLTINNMEAEDAATYYC

SEQ ID NO: 135 - protein, 32 aa, Artificial Sequence
  Synthetic Construct
GVPDRFSGSGSGTDFTLKISRVEAEDLGVYFC

SEQ ID NO: 136 - protein, 32 aa, Artificial Sequence
  Synthetic Construct
GVPARFSGSGSGTSYSLTISSMEAEDAATYYC

SEQ ID NO: 137 - protein, 32 aa, Artificial Sequence
  Synthetic Construct
GVPDRFSGSGSGTDFTLKISRVEAEDLGVYYC

SEQ ID NO: 138 - protein, 32 aa, Artificial Sequence
  Synthetic Construct
  VARIANT 17: Xaa = Glutamic acid or Glutamine
GVPDRFAGSGSGTDFTXKISRLEADDLGIYYC

SEQ ID NO: 139 - protein, 32 aa, Artificial Sequence
  Synthetic Construct
GVPDRFTGSGSGTDFTLTISSVKAEDLAVYCC

SEQ ID NO: 140 - protein, 32 aa, Artificial Sequence
  Synthetic Construct
GVPDRFSGSGSGTDFTLKISRVEGEDLGVYYC

SEQ ID NO: 141 - protein, 32 aa, Artificial Sequence
  Synthetic Construct
  VARIANT 22: Xaa = Glutamic acid or Glutamine
GVPSRFSGRGSGTQFFLKINSXQREDFGSYYC

SEQ ID NO: 142 - protein, 32 aa, Artificial Sequence
  Synthetic Construct
GVPSRFSASGSATQFSLKINSLQSADFGSYYC

SEQ ID NO: 143 - protein, 32 aa, Artificial Sequence
  Synthetic Construct
GVPDRFSGSGSGTDFTLKISRVEADDLGVYLC

SEQ ID NO: 144 - protein, 32 aa, Artificial Sequence
  Synthetic Construct
GVPDRFSGSGSGTDFTLRISGVEAEDLGVYFC

SEQ ID NO: 145 - protein, 33 aa, Artificial Sequence
  Synthetic Construct
  VARIANT 15: Xaa = Any Amino Acid
GVPGRFSGSGSGTYXSFKISSMEGKMGPLIIFC

SEQ ID NO: 146 - protein, 32 aa, Artificial Sequence
  Synthetic Construct
  VARIANT 11: Xaa = Glutamic acid or Glutamine
GVRDRFTGSGXGTDFTLTISSVQGEDLAIYYC

SEQ ID NO: 147 - protein, 32 aa, Artificial Sequence
  Synthetic Construct
GVPDRFTGSGSGTDFTLTISTVKAEDLAVYYC

SEQ ID NO: 148 - protein, 10 aa, Artificial Sequence
  Synthetic Construct
FGGGTKLEIK

SEQ ID NO: 149 - protein, 10 aa, Artificial Sequence
  Synthetic Construct
FGAGTKLELK

SEQ ID NO: 150 - protein, 10 aa, Artificial Sequence
  Synthetic Construct
FGGGTKLVIK

SEQ ID NO: 151 - protein, 10 aa, Artificial Sequence
  Synthetic Construct
FGGGTELEIK

SEQ ID NO: 152 - protein, 10 aa, Artificial Sequence
  Synthetic Construct
FGGGTKLEMK

SEQ ID NO: 153 - protein, 10 aa, Artificial Sequence
  Synthetic Construct
FGSGTKLEIK

SEQ ID NO: 154 - protein, 10 aa, Artificial Sequence
  Synthetic Construct
FGGGTKLEMN

SEQ ID NO: 155 - protein, 10 aa, Artificial Sequence
  Synthetic Construct
FGGGTKLEMK

SEQ ID NO: 156 - protein, 26 aa, Artificial Sequence
  Synthetic Construct
EVKLVESGGGLVKPGGSLKLSCAASG

SEQ ID NO: 157 - protein, 26 aa, Artificial Sequence
  Synthetic Construct
EVQLQQSGPELVKPGTSVKISCKTSG

SEQ ID NO: 158 - protein, 26 aa, Artificial Sequence
  Synthetic Construct
QVQLQQSGAELVRPGASVTLSCKASG

SEQ ID NO: 159 - protein, 26 aa, Artificial Sequence
  Synthetic Construct
EVKLEESGGGLVQPGGSMKLSCAASG

SEQ ID NO: 160 - protein, 26 aa, Artificial Sequence
  Synthetic Construct
EVQLVESGGGLVQPKGSLKLSCAASG

SEQ ID NO: 161 - protein, 26 aa, Artificial Sequence
  Synthetic Construct
QVQLQQSGAELVKPGASVKLSCKASG

SEQ ID NO: 162 - protein, 26 aa, Artificial Sequence
  Synthetic Construct
  VARIANT 1: Xaa = Glutamic acid or Glutamine
XVQLVESGGGLVQPKGSLKLSCAASG

SEQ ID NO: 163 - protein, 26 aa, Artificial Sequence
  Synthetic Construct
QVQLQQSGAELVKPGASVKMSCKTSG

SEQ ID NO: 164 - protein, 26 aa, Artificial Sequence
  Synthetic Construct
  VARIANT 6, 7, 11, 19, 20, 24: Xaa = Glutamic acid or Glutamine
  VARIANT 18: Xaa = Any Amino Acid
EVQLVXXGRGXSQGKGSXXXGRAXRC

SEQ ID NO: 165 - protein, 26 aa, Artificial Sequence
  Synthetic Construct
EVKLEESGGGLVQPGGSMKLSCTASG

SEQ ID NO: 166 - protein, 7 aa, Artificial Sequence
  Synthetic Construct
LSCAASG

SEQ ID NO: 167 - protein, 26 aa, Artificial Sequence
  Synthetic Construct
QVQLQQSGAVLVKPGASVKLSCKASG

SEQ ID NO: 168 - protein, 26 aa, Artificial Sequence
  Synthetic Construct
EVQLQQSGAELVKPGASVKISCKASG

SEQ ID NO: 169 - protein, 26 aa, Artificial Sequence
  Synthetic Construct
QVQLQQSGPELVKPGASLKISCKASG

SEQ ID NO: 170 - protein, 26 aa, Artificial Sequence
  Synthetic Construct
EVQLVESGGGLVQPKGSLKLSCAAFG

SEQ ID NO: 171 - protein, 26 aa, Artificial Sequence
  Synthetic Construct
QVQLQQSGAEVVKPGASVKMSCKTSG

SEQ ID NO: 172 - protein, 26 aa, Artificial Sequence
  Synthetic Construct
EVQLVESGGRLVQPKGSLKLSCAASG

SEQ ID NO: 173 - protein, 26 aa, Artificial Sequence
  Synthetic Construct
QVQLQQYGPELVKPGASVKMSCKVSG

SEQ ID NO: 174 - protein, 18 aa, Artificial Sequence
  Synthetic Construct
WRIGQGKGSLKLARAARG

SEQ ID NO: 175 - protein, 12 aa, Artificial Sequence
  Synthetic Construct
WVRQTPEKRLEW

SEQ ID NO: 176 - protein, 12 aa, Artificial Sequence
  Synthetic Construct
WVKQSHGKSLEW

SEQ ID NO: 177 - protein, 12 aa, Artificial Sequence
  Synthetic Construct
WVKQTPVHGLEW

SEQ ID NO: 178 - protein, 12 aa, Artificial Sequence
  Synthetic Construct
WVRQSPEKGLEW

SEQ ID NO: 179 - protein, 12 aa, Artificial Sequence
  Synthetic Construct
WVRQAPGKGLEW

SEQ ID NO: 180 - protein, 12 aa, Artificial Sequence
  Synthetic Construct
WVKQRPGRGLEW

SEQ ID NO: 181 - protein, 12 aa, Artificial Sequence
  Synthetic Construct
WVKQRPGQGLVW

SEQ ID NO: 182 - protein, 12 aa, Artificial Sequence
  Synthetic Construct
GVPQGPGKGREW

SEQ ID NO: 183 - protein, 12 aa, Artificial Sequence
  Synthetic Construct
WVKQRPGRGPEW

SEQ ID NO: 184 - protein, 12 aa, Artificial Sequence
  Synthetic Construct
WVKQRPGKGLEW

SEQ ID NO: 185 - protein, 12 aa, Artificial Sequence
  Synthetic Construct
WVRQTPGKGLEW

SEQ ID NO: 186 - protein, 12 aa, Artificial Sequence
  Synthetic Construct
WMKQSHGKSLEW

SEQ ID NO: 187 - protein, 12 aa, Artificial Sequence
  Synthetic Construct
RVRQGPGKGREW

SEQ ID NO: 188 - protein, 35 aa, Artificial Sequence
  Synthetic Construct
DSVQGRFTFSRDNARNILYLQMSSLRSEDTAMYYC

SEQ ID NO: 189 - protein, 35 aa, Artificial Sequence
  Synthetic Construct
QKFKGKASLTVDKSSSTAYMELHSLASDDSAVYYC

SEQ ID NO: 190 - protein, 35 aa, Artificial Sequence
  Synthetic Construct
QKFKGKAILTADKSSSTAYMELRSLTSEDSAVYYC

SEQ ID NO: 191 - protein, 35 aa, Artificial Sequence
  Synthetic Construct
ESVKGRFTISRDDSKSTVYLQMNTLRADDTGIYYC

SEQ ID NO: 192 - protein, 35 aa, Artificial Sequence
  Synthetic Construct
DSVKDRITCSRDDSENMFYLQLSSLKTEDTAMYYC

SEQ ID NO: 193 - protein, 35 aa, Artificial Sequence
  Synthetic Construct
EKFKTKATLTVDKPSSTAYMQVSSLTSEDSAVYYC

SEQ ID NO: 194 - protein, 35 aa, Artificial Sequence
  Synthetic Construct
DSVKDRFTCSRDDSENMFYLQLSSLKTEDTAIYYC

SEQ ID NO: 195 - protein, 35 aa, Artificial Sequence
  Synthetic Construct
DSVKDRFTCSRDDSENMFYLQLSSLKTEDTAMYYC

SEQ ID NO: 196 - protein, 35 aa, Artificial Sequence
  Synthetic Construct
EKFKTKATLTVDTSSSTAYMHLSSLTSEDSAVYFC

SEQ ID NO: 197 - protein, 35 aa, Artificial Sequence
  Synthetic Construct
  VARIANT 9, 20, 24, 25, 27, 35: Xaa = Glutamic acid or Glutamine
DSVKDRFTXSRDDSESLFYXQMSXXKXEDTAMYYX

SEQ ID NO: 198 - protein, 35 aa, Artificial Sequence
  Synthetic Construct
ESVKGRFTISRDDSKSTVYLQMNSLRTEDTGIYYC

SEQ ID NO: 199 - protein, 35 aa, Artificial Sequence
  Synthetic Construct
  VARIANT 23: Xaa = Glutamic acid or Glutamine
DSVKDRFTISRDDSESMLYLQMXNLKTEDTAMYYC

SEQ ID NO: 200 - protein, 35 aa, Artificial Sequence
  Synthetic Construct
  VARIANT 30: Xaa = Glutamic acid or Glutamine
EKFRNKAILTVDKPSSTAYMQLNSLTSEDXAVYYC

SEQ ID NO: 201 - protein, 35 aa, Artificial Sequence
  Synthetic Construct
GKFEGKATLTADKSSSTAYMQLSSLTSEDSAVYFC

SEQ ID NO: 202 - protein, 35 aa, Artificial Sequence
  Synthetic Construct
GEFRVRATLTADTSSTTAYMQLSSLTSEDSAVYFC

SEQ ID NO: 203 - protein, 35 aa, Artificial Sequence
  Synthetic Construct
EKFKTKATLTVDKPSSTADMQLSSLTSEDSAVYYC

SEQ ID NO: 204 - protein, 35 aa, Artificial Sequence
  Synthetic Construct
DSVKDRFTISRDDSESIVYVQMNNLKTEDTGMYSC

SEQ ID NO: 205 - protein, 35 aa, Artificial Sequence
  Synthetic Construct
ERFKTKATLTVDTSSSTAYMHLSSLTSEDSAVYFC

SEQ ID NO: 206 - protein, 35 aa, Artificial Sequence
  Synthetic Construct
DSVKDRFTISRDDSESMLYLQMNNLKTEDTAMYYC

SEQ ID NO: 207 - protein, 35 aa, Artificial Sequence
  Synthetic Construct
  VARIANT 34: Xaa = Glutamic acid or Glutamine
QEFKGKATLTVDKSSSTAYMELRSLTFEDSAVYXC

SEQ ID NO: 208 - protein, 35 aa, Artificial Sequence
  Synthetic Construct
DSVKDRFRASRDDSESMLYVQMSNWKQEDTAMYYG

SEQ ID NO: 209 - protein, 11 aa, Artificial Sequence
  Synthetic Construct
WGQGTLVTVSA

SEQ ID NO: 210 - protein, 11 aa, Artificial Sequence
  Synthetic Construct
WGQGTSVTVSS

SEQ ID NO: 211 - protein, 11 aa, Artificial Sequence
  Synthetic Construct
WGQGTTLTVSS

SEQ ID NO: 212 - protein, 11 aa, Artificial Sequence
  Synthetic Construct
WGTGTTVTVST

SEQ ID NO: 213 - protein, 11 aa, Artificial Sequence
  Synthetic Construct
WGTGTTVTVSS

SEQ ID NO: 214 - protein, 11 aa, Artificial Sequence
  Synthetic Construct
WGQGTLVTVST

SEQ ID NO: 215 - protein, 10 aa, Artificial Sequence
  Synthetic Construct
WGQGTIVTVS

SEQ ID NO: 216 - protein, 11 aa, Artificial Sequence
  Synthetic Construct
WGQGASVTVSS

SEQ ID NO: 217 - protein, 7 aa, Artificial Sequence
  Synthetic Construct
WGRGTLV

SEQ ID NO: 218 - protein, 5 aa, Artificial Sequence
  Synthetic Construct
WGQGT

SEQ ID NO: 219 - protein, 108 aa, Artificial Sequence
  Synthetic Construct
  VARIANT 3: Xaa = Glutamic acid or Glutamine
DIXVTQSPASLSASVGETVTITCRASENIYSFLAWYQLKQGKSPQLLVYNSKTFAEGVPSRFSGSGSGTQFSLRINSLQPEDFGSYYCQHHYGTPPWTFGGGTKLEIK

SEQ ID NO: 220 - protein, 108 aa, Artificial Sequence
  Synthetic Construct
EIVMTQSPATLSVSPGERATLSCRASENIYSFLAWYQQKPGQAPRLLIYNSKTFAEGIPARFSGSGSGTEFTLTISSLQSEDFAVYYCQHHYGTPPWTFGQGTKVEIK

SEQ ID NO: 221 - protein, 108 aa, Artificial Sequence
  Synthetic Construct
DIQLTQSPSFLSASVGDRVTITCRASENIYSFLAWYQQKPGKAPKLLIYNSKTFAEGVPSRFSGSGSGTEFTLTISSLQPEDFATYYCQHHYGTPPWTFGQGTKVEIK

SEQ ID NO: 222 - protein, 108 aa, Artificial Sequence
  Synthetic Construct
EIVLTQSPATLSLSPGERATLSCRASENIYSFLAWYQQKPGQAPRLLIYNSKTFAEGIPARFSGSGSGTDFTLTISSLEPEDFAVYYCQHHYGTPPWTFGQGTKVEIK

SEQ ID NO: 223 - protein, 108 aa, Artificial Sequence
  Synthetic Construct
DIQMTQSPSTLSASVGDRVTITCRASENIYSFLAWYQQKPGKAPKLLIYNSKTFAEGVPSRFSGSGSGTEFTLTISSLQPDDFATYYCQHHYGTPPWTFGQGTKVEIK

SEQ ID NO: 224 - protein, 108 aa, Artificial Sequence
  Synthetic Construct
DIQMTQSPSSLSASVGDRVTITCRASENIYSFLAWYQQKPGKAPKLLIYNSKTFAEGVPSRFSGSGSGTDFTLTISSLQPEDFATYYCQHHYGTPPWTFGQGTKVEIK

SEQ ID NO: 225 - protein, 108 aa, Artificial Sequence
  Synthetic Construct
DIQMTQSPSSLSASVGDRVTITCRASENIYSFLAWYQQKPGKAPKLLIYNSKTFAEGVPSRFSGSGSGTDFTFTISSLQPEDIATYYCQHHYGTPPWTFGQGTKVEIK

SEQ ID NO: 226 - protein, 108 aa, Artificial Sequence
  Synthetic Construct
EIVLTQSPGTLSLSPGERATLSCRASENIYSFLAWYQQKPGQAPRLLIYNSKTFAEGIPDRFSGSGSGTDFTLTISRLEPEDFAVYYCQHHYGTPPWTFGQGTKVEIK

SEQ ID NO: 227 - protein, 108 aa, Artificial Sequence
  Synthetic Construct
DIVMTQSPLSLPVTPGEPASISCRASENIYSFLAWYLQKPGQSPQLLIYNSKTFAEGVPDRFSGSGSGTDFTLKISRVEAEDVGVYYCQHHYGTPPWTFGQGTKVEIK

SEQ ID NO: 228 - protein, 108 aa, Artificial Sequence
  Synthetic Construct
DVVMTQSPLSLPVTLGQPASISCRASENIYSFLAWFQQRPGQSPRRLIYNSKTFAEGVPDRFSGSGSGTDFTLKISRVEAEDVGVYYCQHHYGTPPWTFGQGTKVEIK

SEQ ID NO: 229 - protein, 108 aa, Artificial Sequence
  Synthetic Construct
DIVMTQSPDSLAVSLGERATINCRASENIYSFLAWYQQKPGQPPKLLIYNSKTFAEGVPDRFSGSGSGTDFTLTISSLQAEDVAVYYCQHHYGTPPWTFGQGTKVEIK

SEQ ID NO: 230 - protein, 111 aa, Artificial Sequence
  Synthetic Construct
TMSQSPSSLAVSVGEKVTMSCKSSQSLLYSSNQKNCLAWYQQKPGQSPKLLIYWAFTRESGVPDRFTGSGSGTDFTLTISSVKAEDLAVYYCQQYYSYPLTFGAGTKLELK

SEQ ID NO: 231 - protein, 113 aa, Artificial Sequence
  Synthetic Construct
DIVMTQSPDSLAVSLGERATINCKSSQSLLYSSNQKNCLAWYQQKPGQPPKLLIYWAFTRESGVPDRFSGSGSGTDFTLTISSLQAEDVAVYYCQQYYSYPLTFGQGTKVEIK

SEQ ID NO: 232 - protein, 113 aa, Artificial Sequence
  Synthetic Construct
DVVMTQSPLSLPVTLGQPASISCKSSQSLLYSSNQKNCLAWFQQRPGQSPRRLIYWAFTRESGVPDRFSGSGSGTDFTLKISRVEAEDVGVYYCQQYYSYPLTFGQGTKVEIK

SEQ ID NO: 233 - protein, 113 aa, Artificial Sequence
  Synthetic Construct
DIVMTQSPLSLPVTPGEPASISCKSSQSLLYSSNQKNCLAWYLQKPGQSPQLLIYWAFTRESGVPDRFSGSGSGTDFTLKISRVEAEDVGVYYCQQYYSYPLTFGQGTKVEIK

SEQ ID NO: 234 - protein, 113 aa, Artificial Sequence
  Synthetic Construct
DIQLTQSPSFLSASVGDRVTITCKSSQSLLYSSNQKNCLAWYQQKPGKAPKLLIYWAFTRESGVPSRFSGSGSGTEFTLTISSLQPEDFATYYCQQYYSYPLTFGQGTKVEIK

SEQ ID NO: 235 - protein, 113 aa, Artificial Sequence
  Synthetic Construct
DIQMTQSPSTLSASVGDRVTITCKSSQSLLYSSNQKNCLAWYQQKPGKAPKLLIYWAFTRESGVPSRFSGSGSGTEFTLTISSLQPDDFATYYCQQYYSYPLTFGQGTKVEIK

SEQ ID NO: 236 - protein, 113 aa, Artificial Sequence
  Synthetic Construct
EIVMTQSPATLSVSPGERATLSCKSSQSLLYSSNQKNCLAWYQQKPGQAPRLLIYWAFTRESGIPARFSGSGSGTEFTLTISSLQSEDFAVYYCQQYYSYPLTFGQGTKVEIK

SEQ ID NO: 237 - protein, 113 aa, Artificial Sequence
  Synthetic Construct
DIQMTQSPSSLSASVGDRVTITCKSSQSLLYSSNQKNCLAWYQQKPGKAPKLLIYWAFTRESGVPSRFSGSGSGTDFTFTISSLQPEDIATYYCQQYYSYPLTFGQGTKVEIK

SEQ ID NO: 238 - protein, 113 aa, Artificial Sequence
  Synthetic Construct
DIQMTQSPSSLSASVGDRVTITCKSSQSLLYSSNQKNCLAWYQQKPGKAPKLLIYWAFTRESGVPSRFSGSGSGTDFTLTISSLQPEDFATYYCQQYYSYPLTFGQGTKVEIK

SEQ ID NO: 239 - protein, 113 aa, Artificial Sequence
  Synthetic Construct
EIVLTQSPATLSLSPGERATLSCKSSQSLLYSSNQKNCLAWYQQKPGQAPRLLIYWAFTRESGIPARFSGSGSGTDFTLTISSLEPEDFAVYYCQQYYSYPLTFGQGTKVEIK

SEQ ID NO: 240 - protein, 113 aa, Artificial Sequence
  Synthetic Construct
EIVLTQSPGTLSLSPGERATLSCKSSQSLLYSSNQKNCLAWYQQKPGQAPRLLIYWAFTRESGIPDRFSGSGSGTDFTLTISRLEPEDFAVYYCQQYYSYPLTFGQGTKVEIK

SEQ ID NO: 241 - protein, 112 aa, Artificial Sequence
  Synthetic Construct
  VARIANT 3: Xaa = Glutamic acid or Glutamine
DVXMTQTPLTLSVTIGQPASISCKSSQSLLYSNGKTFLSWLLQRPGQSPKRLIYLVSKLDSGVPDRFAGSGSGTDFTLKISRLEADDLGIYYCMQGTHFPLTFGAGTKLELK

SEQ ID NO: 242 - protein, 112 aa, Artificial Sequence
  Synthetic Construct
DVVMTQSPLSLPVTLGQPASISCKSSQSLLYSNGKTFLSWFQQRPGQSPRRLIYLVSKLDSGVPDRFSGSGSGTDFTLKISRVEAEDVGVYYCMQGTHFPLTFGQGTKVEIK

SEQ ID NO: 243 - protein, 112 aa, Artificial Sequence
  Synthetic Construct
DIVMTQSPLSLPVTPGEPASISCKSSQSLLYSNGKTFLSWYLQKPGQSPQLLIYLVSKLDSGVPDRFSGSGSGTDFTLKISRVEAEDVGVYYCMQGTHFPLTFGQGTKVEIK

SEQ ID NO: 244 - protein, 112 aa, Artificial Sequence
  Synthetic Construct
DIVMTQSPDSLAVSLGERATINCKSSQSLLYSNGKTFLSWYQQKPGQPPKLLIYLVSKLDSGVPDRFSGSGSGTDFTLTISSLQAEDVAVYYCMQGTHFPLTFGQGTKVEIK

SEQ ID NO: 245 - protein, 112 aa, Artificial Sequence
  Synthetic Construct
DIQMTQSPSTLSASVGDRVTITCKSSQSLLYSNGKTFLSWYQQKPGKAPKLLIYLVSKLDSGVPSRFSGSGSGTEFTLTISSLQPDDFATYYCMQGTHFPLTFGQGTKVEIK

SEQ ID NO: 246 - protein, 112 aa, Artificial Sequence
  Synthetic Construct
DIQLTQSPSFLSASVGDRVTITCKSSQSLLYSNGKTFLSWYQQKPGKAPKLLIYLVSKLDSGVPSRFSGSGSGTEFTLTISSLQPEDFATYYCMQGTHFPLTFGQGTKVEIK

SEQ ID NO: 247 - protein, 112 aa, Artificial Sequence
  Synthetic Construct
DIQMTQSPSSLSASVGDRVTITCKSSQSLLYSNGKTFLSWYQQKPGKAPKLLIYLVSKLDSGVPSRFSGSGSGTDFTLTISSLQPEDFATYYCMQGTHFPLTFGQGTKVEIK

SEQ ID NO: 248 - protein, 112 aa, Artificial Sequence
  Synthetic Construct
DIQMTQSPSSLSASVGDRVTITCKSSQSLLYSNGKTFLSWYQQKPGKAPKLLIYLVSKLDSGVPSRFSGSGSGTDFTFTISSLQPEDIATYYCMQGTHFPLTFGQGTKVEIK

SEQ ID NO: 249 - protein, 112 aa, Artificial Sequence
  Synthetic Construct
EIVMTQSPATLSVSPGERATLSCKSSQSLLYSNGKTFLSWYQQKPGQAPRLLIYLVSKLDSGIPARFSGSGSGTEFTLTISSLQSEDFAVYYCMQGTHFPLTFGQGTKVEIK

SEQ ID NO: 250 - protein, 112 aa, Artificial Sequence
  Synthetic Construct
EIVLTQSPATLSLSPGERATLSCKSSQSLLYSNGKTFLSWYQQKPGQAPRLLIYLVSKLDSGIPARFSGSGSGTDFTLTISSLEPEDFAVYYCMQGTHFPLTFGQGTKVEIK

SEQ ID NO: 251 - protein, 112 aa, Artificial Sequence
  Synthetic Construct
EIVLTQSPGTLSLSPGERATLSCKSSQSLLYSNGKTFLSWYQQKPGQAPRLLIYLVSKLDSGIPDRFSGSGSGTDFTLTISRLEPEDFAVYYCMQGTHFPLTFGQGTKVEIK

SEQ ID NO: 252 - protein, 112 aa, Artificial Sequence
  Synthetic Construct
  VARIANT 3: Xaa = Glutamic acid or Glutamine
DVXMTQTPLTLSVTIGQPASISCKSSQSLLDSDGKTYLNWLLQRPGQSPKRLIYLVSKLDSGVPDRFTGSGSGTDFTLKISRVEAEDLGVYYCWQGTHFPYTFGGGTKLEIK

SEQ ID NO: 253 - protein, 112 aa, Artificial Sequence
  Synthetic Construct
DVVMTQSPLSLPVTLGQPASISCKSSQSLLDSDGKTYLNWFQQRPGQSPRRLIYLVSKLDSGVPDRFSGSGSGTDFTLKISRVEAEDVGVYYCWQGTHFPYTFGQGTKVEIK

SEQ ID NO: 254 - protein, 112 aa, Artificial Sequence
  Synthetic Construct
DIVMTQSPLSLPVTPGEPASISCKSSQSLLDSDGKTYLNWYLQKPGQSPQLLIYLVSKLDSGVPDRFSGSGSGTDFTLKISRVEAEDVGVYYCWQGTHFPYTFGQGTKVEIK

SEQ ID NO: 255 - protein, 112 aa, Artificial Sequence
  Synthetic Construct
DIVMTQSPDSLAVSLGERATINCKSSQSLLDSDGKTYLNWYQQKPGQPPKLLIYLVSKLDSGVPDRFSGSGSGTDFTLTISSLQAEDVAVYYCWQGTHFPYTFGQGTKVEIK

SEQ ID NO: 256 - protein, 112 aa, Artificial Sequence
  Synthetic Construct
DIQLTQSPSFLSASVGDRVTITCKSSQSLLDSDGKTYLNWYQQKPGKAPKLLIYLVSKLDSGVPSRFSGSGSGTEFTLTISSLQPEDFATYYCWQGTHFPYTFGQGTKVEIK

SEQ ID NO: 257 - protein, 112 aa, Artificial Sequence
  Synthetic Construct
DIQMTQSPSTLSASVGDRVTITCKSSQSLLDSDGKTYLNWYQQKPGKAPKLLIYLVSKLDSGVPSRFSGSGSGTEFTLTISSLQPDDFATYYCWQGTHFPYTFGQGTKVEIK

SEQ ID NO: 258 - protein, 112 aa, Artificial Sequence
  Synthetic Construct
DIQMTQSPSSLSASVGDRVTITCKSSQSLLDSDGKTYLNWYQQKPGKAPKLLIYLVSKLDSGVPSRFSGSGSGTDFTLTISSLQPEDFATYYCWQGTHFPYTFGQGTKVEIK

SEQ ID NO: 259 - protein, 112 aa, Artificial Sequence
  Synthetic Construct
DIQMTQSPSSLSASVGDRVTITCKSSQSLLDSDGKTYLNWYQQKPGKAPKLLIYLVSKLDSGVPSRFSGSGSGTDFTFTISSLQPEDIATYYCWQGTHFPYTFGQGTKVEIK

SEQ ID NO: 260 - protein, 112 aa, Artificial Sequence
  Synthetic Construct
EIVLTQSPATLSLSPGERATLSCKSSQSLLDSDGKTYLNWYQQKPGQAPRLLIYLVSKLDSGIPARFSGSGSGTDFTLTISSLEPEDFAVYYCWQGTHFPYTFGQGTKVEIK

SEQ ID NO: 261 - protein, 112 aa, Artificial Sequence
  Synthetic Construct
EIVMTQSPATLSVSPGERATLSCKSSQSLLDSDGKTYLNWYQQKPGQAPRLLIYLVSKLDSGIPARFSGSGSGTEFTLTISSLQSEDFAVYYCWQGTHFPYTFGQGTKVEIK

SEQ ID NO: 262 - protein, 112 aa, Artificial Sequence
  Synthetic Construct
EIVLTQSPGTLSLSPGERATLSCKSSQSLLDSDGKTYLNWYQQKPGQAPRLLIYLVSKLDSGIPDRFSGSGSGTDFTLTISRLEPEDFAVYYCWQGTHFPYTFGQGTKVEIK

SEQ ID NO: 263 - protein, 104 aa, Artificial Sequence
  Synthetic Construct
VLTQSPALMSASPGEKVTMTCSASSSVSYMYWYQQKPRSSPKPWIYLTSILASGVPARFSGSGSGTSYSLTINNMEAEDAATYYCQQWSFNPYTFGGGTKLVIK

SEQ ID NO: 264 - protein, 106 aa, Artificial Sequence
  Synthetic Construct
EIVLTQSPATLSLSPGERATLSCSASSSVSYMYWYQQKPGQAPRLLIYLTSILASGIPARFSGSGSGTDFTLTISSLEPEDFAVYYCQQWSFNPYTFGQGTKVEIK

SEQ ID NO: 265 - protein, 106 aa, Artificial Sequence
  Synthetic Construct
DIQMTQSPSSLSASVGDRVTITCSASSSVSYMYWYQQKPGKAPKLLIYLTSILASGVPSRFSGSGSGTDFTLTISSLQPEDFATYYCQQWSFNPYTFGQGTKVEIK

SEQ ID NO: 266 - protein, 106 aa, Artificial Sequence
  Synthetic Construct
DIQMTQSPSTLSASVGDRVTITCSASSSVSYMYWYQQKPGKAPKLLIYLTSILASGVPSRFSGSGSGTEFTLTISSLQPDDFATYYCQQWSFNPYTFGQGTKVEIK

SEQ ID NO: 267 - protein, 106 aa, Artificial Sequence
  Synthetic Construct
EIVMTQSPATLSVSPGERATLSCSASSSVSYMYWYQQKPGQAPRLLIYLTSILASGIPARFSGSGSGTEFTLTISSLQSEDFAVYYCQQWSFNPYTFGQGTKVEIK

SEQ ID NO: 268 - protein, 106 aa, Artificial Sequence
  Synthetic Construct
DIQLTQSPSFLSASVGDRVTITCSASSSVSYMYWYQQKPGKAPKLLIYLTSILASGVPSRFSGSGSGTEFTLTISSLQPEDFATYYCQQWSFNPYTFGQGTKVEIK

SEQ ID NO: 269 - protein, 106 aa, Artificial Sequence
  Synthetic Construct
DIQMTQSPSSLSASVGDRVTITCSASSSVSYMYWYQQKPGKAPKLLIYLTSILASGVPSRFSGSGSGTDFTFTISSLQPEDIATYYCQQWSFNPYTFGQGTKVEIK

SEQ ID NO: 270 - protein, 106 aa, Artificial Sequence
  Synthetic Construct
EIVLTQSPGTLSLSPGERATLSCSASSSVSYMYWYQQKPGQAPRLLIYLTSILASGIPDRFSGSGSGTDFTLTISRLEPEDFAVYYCQQWSFNPYTFGQGTKVEIK

SEQ ID NO: 271 - protein, 106 aa, Artificial Sequence
  Synthetic Construct
DIVMTQSPLSLPVTPGEPASISCSASSSVSYMYWYLQKPGQSPQLLIYLTSILASGVPDRFSGSGSGTDFTLKISRVEAEDVGVYYCQQWSFNPYTFGQGTKVEIK

SEQ ID NO: 272 - protein, 106 aa, Artificial Sequence
  Synthetic Construct
DVVMTQSPLSLPVTLGQPASISCSASSSVSYMYWFQQRPGQSPRRLIYLTSILASGVPDRFSGSGSGTDFTLKISRVEAEDVGVYYCQQWSFNPYTFGQGTKVEIK

SEQ ID NO: 273 - protein, 106 aa, Artificial Sequence
  Synthetic Construct
DIVMTQSPDSLAVSLGERATINCSASSSVSYMYWYQQKPGQPPKLLIYLTSILASGVPDRFSGSGSGTDFTLTISSLQAEDVAVYYCQQWSFNPYTFGQGTKVEIK

SEQ ID NO: 274 - protein, 112 aa, Artificial Sequence
  Synthetic Construct
  VARIANT 3: Xaa = Glutamic acid or Glutamine
DVXMTQTPLSLPVSLGDQASISCRSSQSLVHSNGNTYLHWYLQKPGQSPKLLIYKVSNRFSGVPDRFSGSGSGTDFTLKISRVEAEDLGVYFCSQSTHVPLTFGAGTKLELK

SEQ ID NO: 275 - protein, 112 aa, Artificial Sequence
  Synthetic Construct
DVVMTQSPLSLPVTLGQPASISCRSSQSLVHSNGNTYLHWFQQRPGQSPRRLIYKVSNRFSGVPDRFSGSGSGTDFTLKISRVEAEDVGVYYCSQSTHVPLTFGQGTKVEIK

SEQ ID NO: 276 - protein, 112 aa, Artificial Sequence
  Synthetic Construct
DIVMTQSPLSLPVTPGEPASISCRSSQSLVHSNGNTYLHWYLQKPGQSPQLLIYKVSNRFSGVPDRFSGSGSGTDFTLKISRVEAEDVGVYYCSQSTHVPLTFGQGTKVEIK

SEQ ID NO: 277 - protein, 112 aa, Artificial Sequence
  Synthetic Construct
DIVMTQSPDSLAVSLGERATINCRSSQSLVHSNGNTYLHWYQQKPGQPPKLLIYKVSNRFSGVPDRFSGSGSGTDFTLTISSLQAEDVAVYYCSQSTHVPLTFGQGTKVEIK

SEQ ID NO: 278 - protein, 112 aa, Artificial Sequence
  Synthetic Construct
EIVLTQSPATLSLSPGERATLSCRSSQSLVHSNGNTYLHWYQQKPGQAPRLLIYKVSNRFSGIPARFSGSGSGTDFTLTISSLEPEDFAVYYCSQSTHVPLTFGQGTKVEIK

SEQ ID NO: 279 - protein, 112 aa, Artificial Sequence
  Synthetic Construct
DIQMTQSPSSLSASVGDRVTITCRSSQSLVHSNGNTYLHWYQQKPGKAPKLLIYKVSNRFSGVPSRFSGSGSGTDFTLTISSLQPEDFATYYCSQSTHVPLTFGQGTKVEIK

SEQ ID NO: 280 - protein, 112 aa, Artificial Sequence
  Synthetic Construct
DIQMTQSPSSLSASVGDRVTITCRSSQSLVHSNGNTYLHWYQQKPGKAPKLLIYKVSNRFSGVPSRFSGSGSGTDFTFTISSLQPEDIATYYCSQSTHVPLTFGQGTKVEIK

SEQ ID NO: 281 - protein, 112 aa, Artificial Sequence
  Synthetic Construct
EIVMTQSPATLSVSPGERATLSCRSSQSLVHSNGNTYLHWYQQKPGQAPRLLIYKVSNRFSGIPARFSGSGSGTEFTLTISSLQSEDFAVYYCSQSTHVPLTFGQGTKVEIK

SEQ ID NO: 282 - protein, 112 aa, Artificial Sequence
  Synthetic Construct
DIQMTQSPSTLSASVGDRVTITCRSSQSLVHSNGNTYLHWYQQKPGKAPKLLIYKVSNRFSGVPSRFSGSGSGTEFTLTISSLQPDDFATYYCSQSTHVPLTFGQGTKVEIK

SEQ ID NO: 283 - protein, 112 aa, Artificial Sequence
  Synthetic Construct
DIQLTQSPSFLSASVGDRVTITCRSSQSLVHSNGNTYLHWYQQKPGKAPKLLIYKVSNRFSGVPSRFSGSGSGTEFTLTISSLQPEDFATYYCSQSTHVPLTFGQGTKVEIK

SEQ ID NO: 284 - protein, 112 aa, Artificial Sequence
  Synthetic Construct
EIVLTQSPGTLSLSPGERATLSCRSSQSLVHSNGNTYLHWYQQKPGQAPRLLIYKVSNRFSGIPDRFSGSGSGTDFTLTISRLEPEDFAVYYCSQSTHVPLTFGQGTKVEIK

SEQ ID NO: 285 - protein, 104 aa, Artificial Sequence
  Synthetic Construct
  VARIANT 10: Xaa = Glutamic acid or Glutamine
VLTQSPAIMXASPGEKVTMTCSASSSVSYMYWYQQKPRSSPKPWIYLTSILASGVPARFSGSGSGTSYSLTISSMEAEDAATYYCQQWSFNPYTFGGGTKLVIK

SEQ ID NO: 286 - protein, 105 aa, Artificial Sequence
  Synthetic Construct
NVLTQSPALMSASPGEKVTMTCSASSSVSYMYWYQQKPRSSPKPWIYLTSILASGVPARFSGSGSGTSYSLTISSMEAEDAATYYCQQWSFNPYTFGGGTKLVIK

SEQ ID NO: 287 - protein, 112 aa, Artificial Sequence
  Synthetic Construct
DVVMTQTPLSLPVSLGDQASISCRSSQTIIHSNGNTYLEWYLRKPGQSPKLLIYKVSNRFSGVPDRFSGSGSGTDFTLKISRVEAEDLGVYYCFQGSHVPYTFGGGTELEIK

SEQ ID NO: 288 - protein, 112 aa, Artificial Sequence
  Synthetic Construct
DVVMTQSPLSLPVTLGQPASISCRSSQTIIHSNGNTYLEWFQQRPGQSPRRLIYKVSNRFSGVPDRFSGSGSGTDFTLKISRVEAEDVGVYYCFQGSHVPYTFGQGTKVEIK

SEQ ID NO: 289 - protein, 112 aa, Artificial Sequence
  Synthetic Construct
DIVMTQSPLSLPVTPGEPASISCRSSQTIIHSNGNTYLEWYLQKPGQSPQLLIYKVSNRFSGVPDRFSGSGSGTDFTLKISRVEAEDVGVYYCFQGSHVPYTFGQGTKVEIK

SEQ ID NO: 290 - protein, 112 aa, Artificial Sequence
  Synthetic Construct
DIVMTQSPDSLAVSLGERATINCRSSQTIIHSNGNTYLEWYQQKPGQPPKLLIYKVSNRFSGVPDRFSGSGSGTDFTLTISSLQAEDVAVYYCFQGSHVPYTFGQGTKVEIK

SEQ ID NO: 291 - protein, 112 aa, Artificial Sequence
  Synthetic Construct
EIVLTQSPATLSLSPGERATLSCRSSQTIIHSNGNTYLEWYQQKPGQAPRLLIYKVSNRFSGIPARFSGSGSGTDFTLTISSLEPEDFAVYYCFQGSHVPYTFGQGTKVEIK

SEQ ID NO: 292 - protein, 112 aa, Artificial Sequence
  Synthetic Construct
DIQLTQSPSFLSASVGDRVTITCRSSQTIIHSNGNTYLEWYQQKPGKAPKLLIYKVSNRFSGVPSRFSGSGSGTEFTLTISSLQPEDFATYYCFQGSHVPYTFGQGTKVEIK

SEQ ID NO: 293 - protein, 112 aa, Artificial Sequence
  Synthetic Construct
DIQMTQSPSSLSASVGDRVTITCRSSQTIIHSNGNTYLEWYQQKPGKAPKLLIYKVSNRFSGVPSRFSGSGSGTDFTFTISSLQPEDIATYYCFQGSHVPYTFGQGTKVEIK

SEQ ID NO: 294 - protein, 112 aa, Artificial Sequence
  Synthetic Construct
DIQMTQSPSSLSASVGDRVTITCRSSQTIIHSNGNTYLEWYQQKPGKAPKLLIYKVSNRFSGVPSRFSGSGSGTDFTLTISSLQPEDFATYYCFQGSHVPYTFGQGTKVEIK

SEQ ID NO: 295 - protein, 112 aa, Artificial Sequence
  Synthetic Construct
EIVMTQSPATLSVSPGERATLSCRSSQTIIHSNGNTYLEWYQQKPGQAPRLLIYKVSNRFSGIPARFSGSGSGTEFTLTISSLQSEDFAVYYCFQGSHVPYTFGQGTKVEIK

SEQ ID NO: 296 - protein, 112 aa, Artificial Sequence
  Synthetic Construct
DIQMTQSPSTLSASVGDRVTITCRSSQTIIHSNGNTYLEWYQQKPGKAPKLLIYKVSNRFSGVPSRFSGSGSGTEFTLTISSLQPDDFATYYCFQGSHVPYTFGQGTKVEIK

SEQ ID NO: 297 - protein, 112 aa, Artificial Sequence
  Synthetic Construct
EIVLTQSPGTLSLSPGERATLSCRSSQTIIHSNGNTYLEWYQQKPGQAPRLLIYKVSNRFSGIPDRFSGSGSGTDFTLTISRLEPEDFAVYYCFQGSHVPYTFGQGTKVEIK

SEQ ID NO: 298 - protein, 112 aa, Artificial Sequence
  Synthetic Construct
  VARIANT 78: Xaa = Glutamic acid or Glutamine
DVVMTQTPLTLSVTIGQPASISCKSSQSLLYSNGKTFLSWLLQRPGQSPKRLIYLVSKLDSGVPDRFAGSGSGTDFTXKISRLEADDLGIYYCMQGTHFPLTFGGGTKLEMK

SEQ ID NO: 299 - protein, 112 aa, Artificial Sequence
  Synthetic Construct
ITMSQSPSSLAVSVGEKVTMSCKSSQSLLYSSDQKNYLAWYQQKPGQSPKLLIYWASTRESGVPDRFTGSGSGTDFTLTISSVKAEDLAVYCCQQYYSYPLTFGAGTKLELK

SEQ ID NO: 300 - protein, 113 aa, Artificial Sequence
  Synthetic Construct
DIVMTQSPDSLAVSLGERATINCKSSQSLLYSSDQKNYLAWYQQKPGQPPKLLIYWASTRESGVPDRFSGSGSGTDFTLTISSLQAEDVAVYYCQQYYSYPLTFGQGTKVEIK

SEQ ID NO: 301 - protein, 113 aa, Artificial Sequence
  Synthetic Construct
DIVMTQSPLSLPVTPGEPASISCKSSQSLLYSSDQKNYLAWYLQKPGQSPQLLIYWASTRESGVPDRFSGSGSGTDFTLKISRVEAEDVGVYYCQQYYSYPLTFGQGTKVEIK

SEQ ID NO: 302 - protein, 113 aa, Artificial Sequence
  Synthetic Construct
DVVMTQSPLSLPVTLGQPASISCKSSQSLLYSSDQKNYLAWFQQRPGQSPRRLIYWASTRESGVPDRFSGSGSGTDFTLKISRVEAEDVGVYYCQQYYSYPLTFGQGTKVEIK

SEQ ID NO: 303 - protein, 113 aa, Artificial Sequence
  Synthetic Construct
DIQMTQSPSTLSASVGDRVTITCKSSQSLLYSSDQKNYLAWYQQKPGKAPKLLIYWASTRESGVPSRFSGSGSGTEFTLTISSLQPDDFATYYCQQYYSYPLTFGQGTKVEIK

SEQ ID NO: 304 - protein, 113 aa, Artificial Sequence
  Synthetic Construct
DIQLTQSPSFLSASVGDRVTITCKSSQSLLYSSDQKNYLAWYQQKPGKAPKLLIYWASTRESGVPSRFSGSGSGTEFTLTISSLQPEDFATYYCQQYYSYPLTFGQGTKVEIK

SEQ ID NO: 305 - protein, 113 aa, Artificial Sequence
  Synthetic Construct
EIVMTQSPATLSVSPGERATLSCKSSQSLLYSSDQKNYLAWYQQKPGQAPRLLIYWASTRESGIPARFSGSGSGTEFTLTISSLQSEDFAVYYCQQYYSYPLTFGQGTKVEIK

SEQ ID NO: 306 - protein, 113 aa, Artificial Sequence
  Synthetic Construct
DIQMTQSPSSLSASVGDRVTITCKSSQSLLYSSDQKNYLAWYQQKPGKAPKLLIYWASTRESGVPSRFSGSGSGTDFTLTISSLQPEDFATYYCQQYYSYPLTFGQGTKVEIK

SEQ ID NO: 307 - protein, 113 aa, Artificial Sequence
  Synthetic Construct
EIVLTQSPATLSLSPGERATLSCKSSQSLLYSSDQKNYLAWYQQKPGQAPRLLIYWASTRESGIPARFSGSGSGTDFTLTISSLEPEDFAVYYCQQYYSYPLTFGQGTKVEIK

SEQ ID NO: 308 - protein, 113 aa, Artificial Sequence
  Synthetic Construct
DIQMTQSPSSLSASVGDRVTITCKSSQSLLYSSDQKNYLAWYQQKPGKAPKLLIYWASTRESGVPSRFSGSGSGTDFTFTISSLQPEDIATYYCQQYYSYPLTFGQGTKVEIK

SEQ ID NO: 309 - protein, 113 aa, Artificial Sequence
  Synthetic Construct
EIVLTQSPGTLSLSPGERATLSCKSSQSLLYSSDQKNYLAWYQQKPGQAPRLLIYWASTRESGIPDRFSGSGSGTDFTLTISRLEPEDFAVYYCQQYYSYPLTFGQGTKVEIK

SEQ ID NO: 310 - protein, 112 aa, Artificial Sequence
  Synthetic Construct
  VARIANT 3: Xaa = Glutamic acid or Glutamine
DVXMTQTPLSLPVSLGDQASISCRSSQTIIHSNGNTYLEWYLRKPGQSPKLLIYKVSNRFSGVPDRFSGSGSGTDFTLKISRVEGEDLGVYYCFQGSHVPYTFGGGTELEIK

SEQ ID NO: 311 - protein, 105 aa, Artificial Sequence
  Synthetic Construct
  VARIANT 10, 12, 76: Xaa = Glutamic acid or Glutamine
QMSQSPACLXAXVGESVTITCRASENIYSYLAWYQQKQGKSPKLVVYKAKTLAEGVPSRFSGRGSGTQFFLKINSXQREDFGSYYCQHHYGTPFTFGSGTKLEIK

SEQ ID NO: 312 - protein, 107 aa, Artificial Sequence
  Synthetic Construct
DIQLTQSPSFLSASVGDRVTITCRASENIYSYLAWYQQKPGKAPKLLIYKAKTLAEGVPSRFSGSGSGTEFTLTISSLQPEDFATYYCQHHYGTPFTFGQGTKVEIK

SEQ ID NO: 313 - protein, 107 aa, Artificial Sequence
  Synthetic Construct
EIVLTQSPATLSLSPGERATLSCRASENIYSYLAWYQQKPGQAPRLLIYKAKTLAEGIPARFSGSGSGTDFTLTISSLEPEDFAVYYCQHHYGTPFTFGQGTKVEIK

SEQ ID NO: 314 - protein, 107 aa, Artificial Sequence
  Synthetic Construct
DIQMTQSPSTLSASVGDRVTITCRASENIYSYLAWYQQKPGKAPKLLIYKAKTLAEGVPSRFSGSGSGTEFTLTISSLQPDDFATYYCQHHYGTPFTFGQGTKVEIK

SEQ ID NO: 315 - protein, 107 aa, Artificial Sequence
  Synthetic Construct
EIVMTQSPATLSVSPGERATLSCRASENIYSYLAWYQQKPGQAPRLLIYKAKTLAEGIPARFSGSGSGTEFTLTISSLQSEDFAVYYCQHHYGTPFTFGQGTKVEIK

SEQ ID NO: 316 - protein, 107 aa, Artificial Sequence
  Synthetic Construct
DIQMTQSPSSLSASVGDRVTITCRASENIYSYLAWYQQKPGKAPKLLIYKAKTLAEGVPSRFSGSGSGTDFTLTISSLQPEDFATYYCQHHYGTPFTFGQGTKVEIK

SEQ ID NO: 317 - protein, 107 aa, Artificial Sequence
  Synthetic Construct
DIQMTQSPSSLSASVGDRVTITCRASENIYSYLAWYQQKPGKAPKLLIYKAKTLAEGVPSRFSGSGSGTDFTFTISSLQPEDIATYYCQHHYGTPFTFGQGTKVEIK

SEQ ID NO: 318 - protein, 107 aa, Artificial Sequence
  Synthetic Construct
EIVLTQSPGTLSLSPGERATLSCRASENIYSYLAWYQQKPGQAPRLLIYKAKTLAEGIPDRFSGSGSGTDFTLTISRLEPEDFAVYYCQHHYGTPFTFGQGTKVEIK

SEQ ID NO: 319 - protein, 107 aa, Artificial Sequence
  Synthetic Construct
DIVMTQSPLSLPVTPGEPASISCRASENIYSYLAWYLQKPGQSPQLLIYKAKTLAEGVPDRFSGSGSGTDFTLKISRVEAEDVGVYYCQHHYGTPFTFGQGTKVEIK

SEQ ID NO: 320 - protein, 107 aa, Artificial Sequence
  Synthetic Construct
DIVMTQSPDSLAVSLGERATINCRASENIYSYLAWYQQKPGQPPKLLIYKAKTLAEGVPDRFSGSGSGTDFTLTISSLQAEDVAVYYCQHHYGTPFTFGQGTKVEIK

SEQ ID NO: 321 - protein, 107 aa, Artificial Sequence
  Synthetic Construct
DVVMTQSPLSLPVTLGQPASISCRASENIYSYLAWFQQRPGQSPRRLIYKAKTLAEGVPDRFSGSGSGTDFTLKISRVEAEDVGVYYCQHHYGTPFTFGQGTKVEIK

SEQ ID NO: 322 - protein, 107 aa, Artificial Sequence
  Synthetic Construct
DIQMTQSPASLSVSVGETVTITCRTSENVYSNLAWYQQKQGKSPQLLVYAATNLADGVPSRFSASGSATQFSLKINSLQSADFGSYYCHHFWGTPYTFGGGTKLEMN

SEQ ID NO: 323 - protein, 107 aa, Artificial Sequence
  Synthetic Construct
EIVMTQSPATLSVSPGERATLSCRTSENVYSNLAWYQQKPGQAPRLLIYAATNLADGIPARFSGSGSGTEFTLTISSLQSEDFAVYYCHHFWGTPYTFGQGTKVEIK

SEQ ID NO: 324 - protein, 107 aa, Artificial Sequence
  Synthetic Construct
EIVLTQSPATLSLSPGERATLSCRTSENVYSNLAWYQQKPGQAPRLLIYAATNLADGIPARFSGSGSGTDFTLTISSLEPEDFAVYYCHHFWGTPYTFGQGTKVEIK

SEQ ID NO: 325 - protein, 107 aa, Artificial Sequence
  Synthetic Construct
DIQLTQSPSFLSASVGDRVTITCRTSENVYSNLAWYQQKPGKAPKLLIYAATNLADGVPSRFSGSGSGTEFTLTISSLQPEDFATYYCHHFWGTPYTFGQGTKVEIK

SEQ ID NO: 326 - protein, 107 aa, Artificial Sequence
  Synthetic Construct
DIQMTQSPSTLSASVGDRVTITCRTSENVYSNLAWYQQKPGKAPKLLIYAATNLADGVPSRFSGSGSGTEFTLTISSLQPDDFATYYCHHFWGTPYTFGQGTKVEIK

SEQ ID NO: 327 - protein, 107 aa, Artificial Sequence
  Synthetic Construct
DIQMTQSPSSLSASVGDRVTITCRTSENVYSNLAWYQQKPGKAPKLLIYAATNLADGVPSRFSGSGSGTDFTLTISSLQPEDFATYYCHHFWGTPYTFGQGTKVEIK

SEQ ID NO: 328 - protein, 107 aa, Artificial Sequence
  Synthetic Construct
DIQMTQSPSSLSASVGDRVTITCRTSENVYSNLAWYQQKPGKAPKLLIYAATNLADGVPSRFSGSGSGTDFTFTISSLQPEDIATYYCHHFWGTPYTFGQGTKVEIK

SEQ ID NO: 329 - protein, 107 aa, Artificial Sequence
  Synthetic Construct
EIVLTQSPGTLSLSPGERATLSCRTSENVYSNLAWYQQKPGQAPRLLIYAATNLADGIPDRFSGSGSGTDFTLTISRLEPEDFAVYYCHHFWGTPYTFGQGTKVEIK

SEQ ID NO: 330 - protein, 107 aa, Artificial Sequence
  Synthetic Construct
DIVMTQSPLSLPVTPGEPASISCRTSENVYSNLAWYLQKPGQSPQLLIYAATNLADGVPDRFSGSGSGTDFTLKISRVEAEDVGVYYCHHFWGTPYTFGQGTKVEIK

SEQ ID NO: 331 - protein, 107 aa, Artificial Sequence
  Synthetic Construct
DVVMTQSPLSLPVTLGQPASISCRTSENVYSNLAWFQQRPGQSPRRLIYAATNLADGVPDRFSGSGSGTDFTLKISRVEAEDVGVYYCHHFWGTPYTFGQGTKVEIK

SEQ ID NO: 332 - protein, 107 aa, Artificial Sequence
  Synthetic Construct
DIVMTQSPDSLAVSLGERATINCRTSENVYSNLAWYQQKPGQPPKLLIYAATNLADGVPDRFSGSGSGTDFTLTISSLQAEDVAVYYCHHFWGTPYTFGQGTKVEIK

SEQ ID NO: 333 - protein, 112 aa, Artificial Sequence
  Synthetic Construct
  VARIANT 3: Xaa = Glutamic acid or Glutamine
DVXMTQNPLSLPVSLGDQASISCRSSQSLVHSNGYTYLHWYLQKPGQSPKLLIYKVSNRFSGVPDRFSGSGSGTDFTLKISRVEADDLGVYLCSQSTRVPYTFGGGTKLEIK

SEQ ID NO: 334 - protein, 112 aa, Artificial Sequence
  Synthetic Construct
DVVMTQSPLSLPVTLGQPASISCRSSQSLVHSNGYTYLHWFQQRPGQSPRRLIYKVSNRFSGVPDRFSGSGSGTDFTLKISRVEAEDVGVYYCSQSTRVPYTFGQGTKVEIK

SEQ ID NO: 335 - protein, 112 aa, Artificial Sequence
  Synthetic Construct
DIVMTQSPLSLPVTPGEPASISCRSSQSLVHSNGYTYLHWYLQKPGQSPQLLIYKVSNRFSGVPDRFSGSGSGTDFTLKISRVEAEDVGVYYCSQSTRVPYTFGQGTKVEIK

SEQ ID NO: 336 - protein, 112 aa, Artificial Sequence
  Synthetic Construct
DIVMTQSPDSLAVSLGERATINCRSSQSLVHSNGYTYLHWYQQKPGQPPKLLIYKVSNRFSGVPDRFSGSGSGTDFTLTISSLQAEDVAVYYCSQSTRVPYTFGQGTKVEIK

SEQ ID NO: 337 - protein, 112 aa, Artificial Sequence
  Synthetic Construct
EIVLTQSPATLSLSPGERATLSCRSSQSLVHSNGYTYLHWYQQKPGQAPRLLIYKVSNRFSGIPARFSGSGSGTDFTLTISSLEPEDFAVYYCSQSTRVPYTFGQGTKVEIK

SEQ ID NO: 338 - protein, 112 aa, Artificial Sequence
  Synthetic Construct
DIQMTQSPSSLSASVGDRVTITCRSSQSLVHSNGYTYLHWYQQKPGKAPKLLIYKVSNRFSGVPSRFSGSGSGTDFTFTISSLQPEDIATYYCSQSTRVPYTFGQGTKVEIK

SEQ ID NO: 339 - protein, 112 aa, Artificial Sequence
  Synthetic Construct
EIVMTQSPATLSVSPGERATLSCRSSQSLVHSNGYTYLHWYQQKPGQAPRLLIYKVSNRFSGIPARFSGSGSGTEFTLTISSLQSEDFAVYYCSQSTRVPYTFGQGTKVEIK

SEQ ID NO: 340 - protein, 112 aa, Artificial Sequence
  Synthetic Construct
DIQMTQSPSTLSASVGDRVTITCRSSQSLVHSNGYTYLHWYQQKPGKAPKLLIYKVSNRFSGVPSRFSGSGSGTEFTLTISSLQPDDFATYYCSQSTRVPYTFGQGTKVEIK

SEQ ID NO: 341 - protein, 112 aa, Artificial Sequence
  Synthetic Construct
DIQMTQSPSSLSASVGDRVTITCRSSQSLVHSNGYTYLHWYQQKPGKAPKLLIYKVSNRFSGVPSRFSGSGSGTDFTLTISSLQPEDFATYYCSQSTRVPYTFGQGTKVEIK

SEQ ID NO: 342 - protein, 112 aa, Artificial Sequence
  Synthetic Construct
DIQLTQSPSFLSASVGDRVTITCRSSQSLVHSNGYTYLHWYQQKPGKAPKLLIYKVSNRFSGVPSRFSGSGSGTEFTLTISSLQPEDFATYYCSQSTRVPYTFGQGTKVEIK

SEQ ID NO: 343 - protein, 112 aa, Artificial Sequence
  Synthetic Construct
EIVLTQSPGTLSLSPGERATLSCRSSQSLVHSNGYTYLHWYQQKPGQAPRLLIYKVSNRFSGIPDRFSGSGSGTDFTLTISRLEPEDFAVYYCSQSTRVPYTFGQGTKVEIK

SEQ ID NO: 344 - protein, 112 aa, Artificial Sequence
  Synthetic Construct
DVLMTQTPLSLPVSLGDQASISCRFSQSLVHSNGNTYLHWYLQKPGQSPKLLIYKVSNRFSGVPDRFSGSGSGTDFTLRISGVEAEDLGVYFCSQSTRVPPTFGGGTKLEIK

SEQ ID NO: 345 - protein, 112 aa, Artificial Sequence
  Synthetic Construct
DVVMTQSPLSLPVTLGQPASISCRFSQSLVHSNGNTYLHWFQQRPGQSPRRLIYKVSNRFSGVPDRFSGSGSGTDFTLKISRVEAEDVGVYYCSQSTRVPPTFGQGTKVEIK

SEQ ID NO: 346 - protein, 112 aa, Artificial Sequence
  Synthetic Construct
DIVMTQSPLSLPVTPGEPASISCRFSQSLVHSNGNTYLHWYLQKPGQSPQLLIYKVSNRFSGVPDRFSGSGSGTDFTLKISRVEAEDVGVYYCSQSTRVPPTFGQGTKVEIK

SEQ ID NO: 347 - protein, 112 aa, Artificial Sequence
  Synthetic Construct
DIVMTQSPDSLAVSLGERATINCRFSQSLVHSNGNTYLHWYQQKPGQPPKLLIYKVSNRFSGVPDRFSGSGSGTDFTLTISSLQAEDVAVYYCSQSTRVPPTFGQGTKVEIK

SEQ ID NO: 348 - protein, 112 aa, Artificial Sequence
  Synthetic Construct
EIVLTQSPATLSLSPGERATLSCRFSQSLVHSNGNTYLHWYQQKPGQAPRLLIYKVSNRFSGIPARFSGSGSGTDFTLTISSLEPEDFAVYYCSQSTRVPPTFGQGTKVEIK

SEQ ID NO: 349 - protein, 112 aa, Artificial Sequence
  Synthetic Construct
EIVMTQSPATLSVSPGERATLSCRFSQSLVHSNGNTYLHWYQQKPGQAPRLLIYKVSNRFSGIPARFSGSGSGTEFTLTISSLQSEDFAVYYCSQSTRVPPTFGQGTKVEIK

SEQ ID NO: 350 - protein, 112 aa, Artificial Sequence
  Synthetic Construct
DIQLTQSPSFLSASVGDRVTITCRFSQSLVHSNGNTYLHWYQQKPGKAPKLLIYKVSNRFSGVPSRFSGSGSGTEFTLTISSLQPEDFATYYCSQSTRVPPTFGQGTKVEIK

SEQ ID NO: 351 - protein, 112 aa, Artificial Sequence
  Synthetic Construct
DIQMTQSPSTLSASVGDRVTITCRFSQSLVHSNGNTYLHWYQQKPGKAPKLLIYKVSNRFSGVPSRFSGSGSGTEFTLTISSLQPDDFATYYCSQSTRVPPTFGQGTKVEIK

SEQ ID NO: 352 - protein, 112 aa, Artificial Sequence
  Synthetic Construct
DIQMTQSPSSLSASVGDRVTITCRFSQSLVHSNGNTYLHWYQQKPGKAPKLLIYKVSNRFSGVPSRFSGSGSGTDFTLTISSLQPEDFATYYCSQSTRVPPTFGQGTKVEIK

SEQ ID NO: 353 - protein, 112 aa, Artificial Sequence
  Synthetic Construct
DIQMTQSPSSLSASVGDRVTITCRFSQSLVHSNGNTYLHWYQQKPGKAPKLLIYKVSNRFSGVPSRFSGSGSGTDFTFTISSLQPEDIATYYCSQSTRVPPTFGQGTKVEIK

SEQ ID NO: 354 - protein, 112 aa, Artificial Sequence
  Synthetic Construct
EIVLTQSPGTLSLSPGERATLSCRFSQSLVHSNGNTYLHWYQQKPGQAPRLLIYKVSNRFSGIPDRFSGSGSGTDFTLTISRLEPEDFAVYYCSQSTRVPPTFGQGTKVEIK

SEQ ID NO: 355 - protein, 117 aa, Artificial Sequence
  Synthetic Construct
EVQLVESGGGLVQPKGSLKLSCAAFGFNFNTYAMKWVRQTPGKGLEWIARIRSNSNDYATNYSDSVKDRFTISRDDSESIVYVQMNNLKTEDTGMYSCVGHKINNYPFAHWGRGTLV

SEQ ID NO: 356 - protein, 105 aa, Artificial Sequence
  Synthetic Construct
DIQMTQSPSSLSASVGDRVTITCKASSNVNYMSWYQQKPGKAPKLLIYFTSNLPSGVPSRFSGSGSGTDFTFTISSLQPEDIATYYCSGEVTQFTFGQGTKVEIK

SEQ ID NO: 357 - protein, 105 aa, Artificial Sequence
  Synthetic Construct
DIQLTQSPSFLSASVGDRVTITCKASSNVNYMSWYQQKPGKAPKLLIYFTSNLPSGVPSRFSGSGSGTEFTLTISSLQPEDFATYYCSGEVTQFTFGQGTKVEIK

SEQ ID NO: 358 - protein, 105 aa, Artificial Sequence
  Synthetic Construct
DIQMTQSPSSLSASVGDRVTITCKASSNVNYMSWYQQKPGKAPKLLIYFTSNLPSGVPSRFSGSGSGTDFTLTISSLQPEDFATYYCSGEVTQFTFGQGTKVEIK

SEQ ID NO: 359 - protein, 105 aa, Artificial Sequence
  Synthetic Construct
DIQMTQSPSTLSASVGDRVTITCKASSNVNYMSWYQQKPGKAPKLLIYFTSNLPSGVPSRFSGSGSGTEFTLTISSLQPDDFATYYCSGEVTQFTFGQGTKVEIK

SEQ ID NO: 360 - protein, 105 aa, Artificial Sequence
  Synthetic Construct
EIVMTQSPATLSVSPGERATLSCKASSNVNYMSWYQQKPGQAPRLLIYFTSNLPSGIPARFSGSGSGTEFTLTISSLQSEDFAVYYCSGEVTQFTFGQGTKVEIK

SEQ ID NO: 361 - protein, 105 aa, Artificial Sequence
  Synthetic Construct
EIVLTQSPGTLSLSPGERATLSCKASSNVNYMSWYQQKPGQAPRLLIYFTSNLPSGIPDRFSGSGSGTDFTLTISRLEPEDFAVYYCSGEVTQFTFGQGTKVEIK

SEQ ID NO: 362 - protein, 105 aa, Artificial Sequence
  Synthetic Construct
DIVMTQSPLSLPVTPGEPASISCKASSNVNYMSWYLQKPGQSPQLLIYFTSNLPSGVPDRFSGSGSGTDFTLKISRVEAEDVGVYYCSGEVTQFTFGQGTKVEIK

SEQ ID NO: 363 - protein, 105 aa, Artificial Sequence
  Synthetic Construct
DVVMTQSPLSLPVTLGQPASISCKASSNVNYMSWFQQRPGQSPRRLIYFTSNLPSGVPDRFSGSGSGTDFTLKISRVEAEDVGVYYCSGEVTQFTFGQGTKVEIK

SEQ ID NO: 364 - protein, 105 aa, Artificial Sequence
  Synthetic Construct
DIVMTQSPDSLAVSLGERATINCKASSNVNYMSWYQQKPGQPPKLLIYFTSNLPSGVPDRFSGSGSGTDFTLTISSLQAEDVAVYYCSGEVTQFTFGQGTKVEIK

SEQ ID NO: 365 - protein, 112 aa, Artificial Sequence
  Synthetic Construct
DVVMTQTPLSLPVSLGDQASISCRSSQTIIHSNGNTYLEWYLRKPGQSPKLLIYKVSNRFCGVPDRFSGSGSGTDFTLKISRVEAEDLGVYYCFQGSHVPYTFGGGTELEIK

SEQ ID NO: 366 - protein, 112 aa, Artificial Sequence
  Synthetic Construct
DVVMTQSPLSLPVTLGQPASISCRSSQTIIHSNGNTYLEWFQQRPGQSPRRLIYKVSNRFCGVPDRFSGSGSGTDFTLKISRVEAEDVGVYYCFQGSHVPYTFGQGTKVEIK

SEQ ID NO: 367 - protein, 112 aa, Artificial Sequence
  Synthetic Construct
DIVMTQSPLSLPVTPGEPASISCRSSQTIIHSNGNTYLEWYLQKPGQSPQLLIYKVSNRFCGVPDRFSGSGSGTDFTLKISRVEAEDVGVYYCFQGSHVPYTFGQGTKVEIK

SEQ ID NO: 368 - protein, 112 aa, Artificial Sequence
  Synthetic Construct
DIVMTQSPDSLAVSLGERATINCRSSQTIIHSNGNTYLEWYQQKPGQPPKLLIYKVSNRFCGVPDRFSGSGSGTDFTLTISSLQAEDVAVYYCFQGSHVPYTFGQGTKVEIK

SEQ ID NO: 369 - protein, 112 aa, Artificial Sequence
  Synthetic Construct
EIVLTQSPATLSLSPGERATLSCRSSQTIIHSNGNTYLEWYQQKPGQAPRLLIYKVSNRFCGIPARFSGSGSGTDFTLTISSLEPEDFAVYYCFQGSHVPYTFGQGTKVEIK

SEQ ID NO: 370 - protein, 112 aa, Artificial Sequence
  Synthetic Construct
EIVMTQSPATLSVSPGERATLSCRSSQTIIHSNGNTYLEWYQQKPGQAPRLLIYKVSNRFCGIPARFSGSGSGTEFTLTISSLQSEDFAVYYCFQGSHVPYTFGQGTKVEIK

SEQ ID NO: 371 - protein, 112 aa, Artificial Sequence
  Synthetic Construct
DIQMTQSPSSLSASVGDRVTITCRSSQTIIHSNGNTYLEWYQQKPGKAPKLLIYKVSNRFCGVPSRFSGSGSGTDFTFTISSLQPEDIATYYCFQGSHVPYTFGQGTKVEIK

SEQ ID NO: 372 - protein, 112 aa, Artificial Sequence
  Synthetic Construct
EIVLTQSPGTLSLSPGERATLSCRSSQTIIHSNGNTYLEWYQQKPGQAPRLLIYKVSNRFCGIPDRFSGSGSGTDFTLTISRLEPEDFAVYYCFQGSHVPYTFGQGTKVEIK

SEQ ID NO: 373 - protein, 112 aa, Artificial Sequence
  Synthetic Construct
DIQLTQSPSFLSASVGDRVTITCRSSQTIIHSNGNTYLEWYQQKPGKAPKLLIYKVSNRFCGVPSRFSGSGSGTEFTLTISSLQPEDFATYYCFQGSHVPYTFGQGTKVEIK

SEQ ID NO: 374 - protein, 112 aa, Artificial Sequence
  Synthetic Construct
DIQMTQSPSTLSASVGDRVTITCRSSQTIIHSNGNTYLEWYQQKPGKAPKLLIYKVSNRFCGVPSRFSGSGSGTEFTLTISSLQPDDFATYYCFQGSHVPYTFGQGTKVEIK

SEQ ID NO: 375 - protein, 112 aa, Artificial Sequence
  Synthetic Construct
DIQMTQSPSSLSASVGDRVTITCRSSQTIIHSNGNTYLEWYQQKPGKAPKLLIYKVSNRFCGVPSRFSGSGSGTDFTLTISSLQPEDFATYYCFQGSHVPYTFGQGTKVEIK

SEQ ID NO: 376 - protein, 113 aa, Artificial Sequence
  Synthetic Construct
  VARIANT 3, 50, 73: Xaa = Glutamic acid or Glutamine
DIXMTQSPSSLTVTAGEKVTMSCKSSQSLLNSGNQKKYLTWYQQKPGQPXKLLIYWASTRESGVRDRFTGSGXGTDFTLTISSVQGEDLAIYYCQNDYGFPLTFGGGTKLEMK

SEQ ID NO: 377 - protein, 113 aa, Artificial Sequence
  Synthetic Construct
DIVMTQSPDSLAVSLGERATINCKSSQSLLNSGNQKKYLTWYQQKPGQPPKLLIYWASTRESGVPDRFSGSGSGTDFTLTISSLQAEDVAVYYCQNDYGFPLTFGQGTKVEIK

SEQ ID NO: 378 - protein, 113 aa, Artificial Sequence
  Synthetic Construct
DVVMTQSPLSLPVTLGQPASISCKSSQSLLNSGNQKKYLTWFQQRPGQSPRRLIYWASTRESGVPDRFSGSGSGTDFTLKISRVEAEDVGVYYCQNDYGFPLTFGQGTKVEIK

SEQ ID NO: 379 - protein, 113 aa, Artificial Sequence
  Synthetic Construct
DIVMTQSPLSLPVTPGEPASISCKSSQSLLNSGNQKKYLTWYLQKPGQSPQLLIYWASTRESGVPDRFSGSGSGTDFTLKISRVEAEDVGVYYCQNDYGFPLTFGQGTKVEIK

SEQ ID NO: 380 - protein, 113 aa, Artificial Sequence
  Synthetic Construct
DIQMTQSPSSLSASVGDRVTITCKSSQSLLNSGNQKKYLTWYQQKPGKAPKLLIYWASTRESGVPSRFSGSGSGTDFTFTISSLQPEDIATYYCQNDYGFPLTFGQGTKVEIK

SEQ ID NO: 381 - protein, 113 aa, Artificial Sequence
  Synthetic Construct
EIVLTQSPATLSLSPGERATLSCKSSQSLLNSGNQKKYLTWYQQKPGQAPRLLIYWASTRESGIPARFSGSGSGTDFTLTISSLEPEDFAVYYCQNDYGFPLTFGQGTKVEIK

SEQ ID NO: 382 - protein, 113 aa, Artificial Sequence
  Synthetic Construct
EIVMTQSPATLSVSPGERATLSCKSSQSLLNSGNQKKYLTWYQQKPGQAPRLLIYWASTRESGIPARFSGSGSGTEFTLTISSLQSEDFAVYYCQNDYGFPLTFGQGTKVEIK

SEQ ID NO: 383 - protein, 113 aa, Artificial Sequence
  Synthetic Construct
DIQMTQSPSTLSASVGDRVTITCKSSQSLLNSGNQKKYLTWYQQKPGKAPKLLIYWASTRESGVPSRFSGSGSGTEFTLTISSLQPDDFATYYCQNDYGFPLTFGQGTKVEIK

SEQ ID NO: 384 - protein, 113 aa, Artificial Sequence
  Synthetic Construct
EIVLTQSPGTLSLSPGERATLSCKSSQSLLNSGNQKKYLTWYQQKPGQAPRLLIYWASTRESGIPDRFSGSGSGTDFTLTISRLEPEDFAVYYCQNDYGFPLTFGQGTKVEIK

SEQ ID NO: 385 - protein, 113 aa, Artificial Sequence
  Synthetic Construct
DIQLTQSPSFLSASVGDRVTITCKSSQSLLNSGNQKKYLTWYQQKPGKAPKLLIYWASTRESGVPSRFSGSGSGTEFTLTISSLQPEDFATYYCQNDYGFPLTFGQGTKVEIK

SEQ ID NO: 386 - protein, 113 aa, Artificial Sequence
  Synthetic Construct
DIQMTQSPSSLSASVGDRVTITCKSSQSLLNSGNQKKYLTWYQQKPGKAPKLLIYWASTRESGVPSRFSGSGSGTDFTLTISSLQPEDFATYYCQNDYGFPLTFGQGTKVEIK

SEQ ID NO: 387 - protein, 109 aa, Artificial Sequence
  Synthetic Construct
TQSPSSLAVSVGEKVTMTCKSSQSLLYSGNQKNFLAWYQQKPGQSPKLLIYWASTRESGVPDRFTGSGSGTDFTLTISTVKAEDLAVYYCQQYYSYPFTFGSGTKLEIK

SEQ ID NO: 388 - protein, 113 aa, Artificial Sequence
  Synthetic Construct
DIVMTQSPDSLAVSLGERATINCKSSQSLLYSGNQKNFLAWYQQKPGQPPKLLIYWASTRESGVPDRFSGSGSGTDFTLTISSLQAEDVAVYYCQQYYSYPFTFGQGTKVEIK

SEQ ID NO: 389 - protein, 113 aa, Artificial Sequence
  Synthetic Construct
DIVMTQSPLSLPVTPGEPASISCKSSQSLLYSGNQKNFLAWYLQKPGQSPQLLIYWASTRESGVPDRFSGSGSGTDFTLKISRVEAEDVGVYYCQQYYSYPFTFGQGTKVEIK

SEQ ID NO: 390 - protein, 113 aa, Artificial Sequence
  Synthetic Construct
DVVMTQSPLSLPVTLGQPASISCKSSQSLLYSGNQKNFLAWFQQRPGQSPRRLIYWASTRESGVPDRFSGSGSGTDFTLKISRVEAEDVGVYYCQQYYSYPFTFGQGTKVEIK

SEQ ID NO: 391 - protein, 113 aa, Artificial Sequence
  Synthetic Construct
DIQLTQSPSFLSASVGDRVTITCKSSQSLLYSGNQKNFLAWYQQKPGKAPKLLIYWASTRESGVPSRFSGSGSGTEFTLTISSLQPEDFATYYCQQYYSYPFTFGQGTKVEIK

SEQ ID NO: 392 - protein, 113 aa, Artificial Sequence
  Synthetic Construct
DIQMTQSPSTLSASVGDRVTITCKSSQSLLYSGNQKNFLAWYQQKPGKAPKLLIYWASTRESGVPSRFSGSGSGTEFTLTISSLQPDDFATYYCQQYYSYPFTFGQGTKVEIK

SEQ ID NO: 393 - protein, 113 aa, Artificial Sequence
  Synthetic Construct
EIVMTQSPATLSVSPGERATLSCKSSQSLLYSGNQKNFLAWYQQKPGQAPRLLIYWASTRESGIPARFSGSGSGTEFTLTISSLQSEDFAVYYCQQYYSYPFTFGQGTKVEIK

SEQ ID NO: 394 - protein, 113 aa, Artificial Sequence
  Synthetic Construct
DIQMTQSPSSLSASVGDRVTITCKSSQSLLYSGNQKNFLAWYQQKPGKAPKLLIYWASTRESGVPSRFSGSGSGTDFTFTISSLQPEDIATYYCQQYYSYPFTFGQGTKVEIK

SEQ ID NO: 395 - protein, 113 aa, Artificial Sequence
  Synthetic Construct
EIVLTQSPATLSLSPGERATLSCKSSQSLLYSGNQKNFLAWYQQKPGQAPRLLIYWASTRESGIPARFSGSGSGTDFTLTISSLEPEDFAVYYCQQYYSYPFTFGQGTKVEIK

SEQ ID NO: 396 - protein, 113 aa, Artificial Sequence
  Synthetic Construct
DIQMTQSPSSLSASVGDRVTITCKSSQSLLYSGNQKNFLAWYQQKPGKAPKLLIYWASTRESGVPSRFSGSGSGTDFTLTISSLQPEDFATYYCQQYYSYPFTFGQGTKVEIK

SEQ ID NO: 397 - protein, 113 aa, Artificial Sequence
  Synthetic Construct
EIVLTQSPGTLSLSPGERATLSCKSSQSLLYSGNQKNFLAWYQQKPGQAPRLLIYWASTRESGIPDRFSGSGSGTDFTLTISRLEPEDFAVYYCQQYYSYPFTFGQGTKVEIK

SEQ ID NO: 398 - protein, 111 aa, Artificial Sequence
  Synthetic Construct
TMSQSPSSLAVSVGEKVTMSCKSSQSLLYSSDQKNYLAWYQQKPGQSPKLLIYWASTRESGVPDRFTGSGSGTDFTLTISSVKAEDLAVYCCQQYYSYPLTFGAGTKLELK

SEQ ID NO: 399 - protein, 119 aa, Artificial Sequence
  Synthetic Construct
EVKLVESGGGLVKPGGSLKLSCAASGFTLSSYAMSWVRQTPEKRLEWVASISRGGSTYYPDSVQGRFTFSRDNARNILYLQMSSLRSEDTAMYYCTRGYGYYRTPFANWGQGTLVTVSA

SEQ ID NO: 400 - protein, 119 aa, Artificial Sequence
  Synthetic Construct
QVQLQESGPGLVKPSETLSLTCTVSGFTLSSYAMSWIRQPPGKGLEWVASISRGGSTYYPPSLKSRVTISVDTSKNQFSLKLSSVTAADTAVYYCTRGYGYYRTPFANWGQGTLVTVSS

SEQ ID NO: 401 - protein, 119 aa, Artificial Sequence
  Synthetic Construct
EVQLLESGGGLVQPGGSLRLSCAASGFTLSSYAMSWVRQAPGKGLEWVASISRGGSTYYPDSVKGRFTISRDNSKNTLYLQMNSLRAEDTAVYYCTRGYGYYRTPFANWGQGTLVTVSS

SEQ ID NO: 402 - protein, 119 aa, Artificial Sequence
  Synthetic Construct
EVQLVESGGGLVQPGGSLRLSCAASGFTLSSYAMSWVRQAPGKGLEWVASISRGGSTYYPDSVKGRFTISRDNAKNSLYLQMNSLRAEDTAVYYCTRGYGYYRTPFANWGQGTLVTVSS

SEQ ID NO: 403 - protein, 119 aa, Artificial Sequence
  Synthetic Construct
QVQLVESGGGVVQPGRSLRLSCAASGFTLSSYAMSWVRQAPGKGLEWVASISRGGSTYYPDSVKGRFTISRDNSKNTLYLQMNSLRAEDTAVYYCTRGYGYYRTPFANWGQGTLVTVSS

SEQ ID NO: 404 - protein, 119 aa, Artificial Sequence
  Synthetic Construct
QVQLVQSGAEVKKPGSSVKVSCKASGFTLSSYAMSWVRQAPGQGLEWVASISRGGSTYYPQKFQGRVTITADESTSTAYMELSSLRSEDTAVYYCTRGYGYYRTPFANWGQGTLVTVSS

SEQ ID NO: 405 - protein, 119 aa, Artificial Sequence
  Synthetic Construct
QVQLVQSGAEVKKPGASVKVSCKASGFTLSSYAMSWVRQAPGQGLEWVASISRGGSTYYPQKFQGRVTMTRDTSTSTVYMELSSLRSEDTAVYYCTRGYGYYRTPFANWGQGTLVTVSS

SEQ ID NO: 406 - protein, 119 aa, Artificial Sequence
  Synthetic Construct
EVQLVQSGAEVKKPGESLKISCKGSGFTLSSYAMSWVRQMPGKGLEWVASISRGGSTYYPPSFQGQVTISADKSISTAYLQWSSLKASDTAMYYCTRGYGYYRTPFANWGQGTLVTVSS

SEQ ID NO: 407 - protein, 119 aa, Artificial Sequence
  Synthetic Construct
QLQLQESGPGLVKPSETLSLTCTVSGFTLSSYAMSWIRQPPGKGLEWVASISRGGSTYYPPSLKSRVTISVDTSKNQFSLKLSSVTAADTAVYYCTRGYGYYRTPFANWGQGTLVTVSS

SEQ ID NO: 408 - protein, 119 aa, Artificial Sequence
  Synthetic Construct
QVQLQESGPGLVKPSQTLSLTCTVSGFTLSSYAMSWIRQPPGKGLEWVASISRGGSTYYPPSLKSRVTISVDTSKNQFSLKLSSVTAADTAVYYCTRGYGYYRTPFANWGQGTLVTVSS

SEQ ID NO: 409 - protein, 119 aa, Artificial Sequence
  Synthetic Construct
EVQLQQSGPELVKPGTSVKISCKTSGYTFTEYTMHWVKQSHGKSLEWIGGINPNNGGTSYSQKFKGKASLTVDKSSSTAYMELHSLASDDSAVYYCARGGSHYYAMDYWGQGTSVTVSS

SEQ ID NO: 410 - protein, 119 aa, Artificial Sequence
  Synthetic Construct
QVQLVQSGAEVKKPGASVKVSCKASGYTFTEYTMHWVRQAPGQGLEWIGGINPNNGGTSYSQKFQGRVTMTRDTSTSTVYMELSSLRSEDTAVYYCARGGSHYYAMDYWGQGTLVTVSS

SEQ ID NO: 411 - protein, 119 aa, Artificial Sequence
  Synthetic Construct
EVQLVQSGAEVKKPGESLKISCKGSGYTFTEYTMHWVRQMPGKGLEWIGGINPNNGGTSYSPSFQGQVTISADKSISTAYLQWSSLKASDTAMYYCARGGSHYYAMDYWGQGTLVTVSS

SEQ ID NO: 412 - protein, 119 aa, Artificial Sequence
  Synthetic Construct
QVQLVQSGAEVKKPGSSVKVSCKASGYTFTEYTMHWVRQAPGQGLEWIGGINPNNGGTSYSQKFQGRVTITADESTSTAYMELSSLRSEDTAVYYCARGGSHYYAMDYWGQGTLVTVSS

SEQ ID NO: 413 - protein, 119 aa, Artificial Sequence
  Synthetic Construct
EVQLLESGGGLVQPGGSLRLSCAASGYTFTEYTMHWVRQAPGKGLEWIGGINPNNGGTSYSDSVKGRFTISRDNSKNTLYLQMNSLRAEDTAVYYCARGGSHYYAMDYWGQGTLVTVSS

SEQ ID NO: 414 - protein, 119 aa, Artificial Sequence
  Synthetic Construct
QVQLVESGGGVVQPGRSLRLSCAASGYTFTEYTMHWVRQAPGKGLEWIGGINPNNGGTSYSDSVKGRFTISRDNSKNTLYLQMNSLRAEDTAVYYCARGGSHYYAMDYWGQGTLVTVSS

SEQ ID NO: 415 - protein, 119 aa, Artificial Sequence
  Synthetic Construct
EVQLVESGGGLVQPGGSLRLSCAASGYTFTEYTMHWVRQAPGKGLEWIGGINPNNGGTSYSDSVKGRFTISRDNAKNSLYLQMNSLRAEDTAVYYCARGGSHYYAMDYWGQGTLVTVSS

SEQ ID NO: 416 - protein, 119 aa, Artificial Sequence
  Synthetic Construct
QVQLQESGPGLVKPSETLSLTCTVSGYTFTEYTMHWIRQPPGKGLEWIGGINPNNGGTSYSPSLKSRVTISVDTSKNQFSLKLSSVTAADTAVYYCARGGSHYYAMDYWGQGTLVTVSS

SEQ ID NO: 417 - protein, 119 aa, Artificial Sequence
  Synthetic Construct
EVQLVESGGGLVKPGGSLRLSCAASGYTFTEYTMHWVRQAPGKGLEWIGGINPNNGGTSYSAPVKGRFTISRDDSKNTLYLQMNSLKTEDTAVYYCARGGSHYYAMDYWGQGTLVTVSS

SEQ ID NO: 418 - protein, 119 aa, Artificial Sequence
  Synthetic Construct
QLQLQESGPGLVKPSETLSLTCTVSGYTFTEYTMHWIRQPPGKGLEWIGGINPNNGGTSYSPSLKSRVTISVDTSKNQFSLKLSSVTAADTAVYYCARGGSHYYAMDYWGQGTLVTVSS

SEQ ID NO: 419 - protein, 125 aa, Artificial Sequence
  Synthetic Construct
QVQLQQSGAELVRPGASVTLSCKASGYTFTDYEMHWVKQTPVHGLEWIGVIDPETGGTAYNQKFKGKAILTADKSSSTAYMELRSLTSEDSAVYYCTSPDYYGSSYPLYYAMDYWGQGTSVTVSS

SEQ ID NO: 420 - protein, 125 aa, Artificial Sequence
  Synthetic Construct
QVQLVQSGAEVKKPGASVKVSCKASGYTFTDYEMHWVRQAPGQGLEWIGVIDPETGGTAYNQKFQGRVTMTRDTSTSTVYMELSSLRSEDTAVYYCTSPDYYGSSYPLYYAMDYWGQGTLVTVSS

SEQ ID NO: 421 - protein, 125 aa, Artificial Sequence
  Synthetic Construct
EVQLVQSGAEVKKPGESLKISCKGSGYTFTDYEMHWVRQMPGKGLEWIGVIDPETGGTAYNPSFQGQVTISADKSISTAYLQWSSLKASDTAMYYCTSPDYYGSSYPLYYAMDYWGQGTLVTVSS

SEQ ID NO: 422 - protein, 125 aa, Artificial Sequence
  Synthetic Construct
QVQLVESGGGVVQPGRSLRLSCAASGYTFTDYEMHWVRQAPGKGLEWIGVIDPETGGTAYNDSVKGRFTISRDNSKNTLYLQMNSLRAEDTAVYYCTSPDYYGSSYPLYYAMDYWGQGTLVTVSS

SEQ ID NO: 423 - protein, 125 aa, Artificial Sequence
  Synthetic Construct
EVQLLESGGGLVQPGGSLRLSCAASGYTFTDYEMHWVRQAPGKGLEWIGVIDPETGGTAYNDSVKGRFTISRDNSKNTLYLQMNSLRAEDTAVYYCTSPDYYGSSYPLYYAMDYWGQGTLVTVSS

SEQ ID NO: 424 - protein, 125 aa, Artificial Sequence
  Synthetic Construct
QVQLVQSGAEVKKPGSSVKVSCKASGYTFTDYEMHWVRQAPGQGLEWIGVIDPETGGTAYNQKFQGRVTITADESTSTAYMELSSLRSEDTAVYYCTSPDYYGSSYPLYYAMDYWGQGTLVTVSS

SEQ ID NO: 425 - protein, 125 aa, Artificial Sequence
  Synthetic Construct
EVQLVESGGGLVQPGGSLRLSCAASGYTFTDYEMHWVRQAPGKGLEWIGVIDPETGGTAYNDSVKGRFTISRDNAKNSLYLQMNSLRAEDTAVYYCTSPDYYGSSYPLYYAMDYWGQGTLVTVSS

SEQ ID NO: 426 - protein, 125 aa, Artificial Sequence
  Synthetic Construct
QVQLQESGPGLVKPSETLSLTCTVSGYTFTDYEMHWIRQPPGKGLEWIGVIDPETGGTAYNPSLKSRVTISVDTSKNQFSLKLSSVTAADTAVYYCTSPDYYGSSYPLYYAMDYWGQGTLVTVSS

SEQ ID NO: 427 - protein, 125 aa, Artificial Sequence
  Synthetic Construct
EVQLVESGGGLVKPGGSLRLSCAASGYTFTDYEMHWVRQAPGKGLEWIGVIDPETGGTAYNAPVKGRFTISRDDSKNTLYLQMNSLKTEDTAVYYCTSPDYYGSSYPLYYAMDYWGQGTLVTVSS

SEQ ID NO: 428 - protein, 125 aa, Artificial Sequence
  Synthetic Construct
QLQLQESGPGLVKPSETLSLTCTVSGYTFTDYEMHWIRQPPGKGLEWIGVIDPETGGTAYNPSLKSRVTISVDTSKNQFSLKLSSVTAADTAVYYCTSPDYYGSSYPLYYAMDYWGQGTLVTVSS

SEQ ID NO: 429 - protein, 116 aa, Artificial Sequence
  Synthetic Construct
EVKLEESGGGLVQPGGSMKLSCAASGFTFSDAWMGWVRQSPEKGLEWVAEIRDKVKNHATYYAESVKGRFTISRDDSKSTVYLQMNTLRADDTGIYYCRLGVFDYWGQGTTLTVSS

SEQ ID NO: 430 - protein, 116 aa, Artificial Sequence
  Synthetic Construct
EVQLVESGGGLVKPGGSLRLSCAASGFTFSDAWMGWVRQAPGKGLEWVAEIRDKVKNHATYYAAPVKGRFTISRDDSKNTLYLQMNSLKTEDTAVYYCRLGVFDYWGQGTLVTVSS

SEQ ID NO: 431 - protein, 116 aa, Artificial Sequence
  Synthetic Construct
EVQLVESGGGLVQPGGSLRLSCAASGFTFSDAWMGWVRQAPGKGLEWVAEIRDKVKNHATYYADSVKGRFTISRDNAKNSLYLQMNSLRAEDTAVYYCRLGVFDYWGQGTLVTVSS

SEQ ID NO: 432 - protein, 116 aa, Artificial Sequence
  Synthetic Construct
EVQLLESGGGLVQPGGSLRLSCAASGFTFSDAWMGWVRQAPGKGLEWVAEIRDKVKNHATYYADSVKGRFTISRDNSKNTLYLQMNSLRAEDTAVYYCRLGVFDYWGQGTLVTVSS

SEQ ID NO: 433 - protein, 116 aa, Artificial Sequence
  Synthetic Construct
QVQLVESGGGVVQPGRSLRLSCAASGFTFSDAWMGWVRQAPGKGLEWVAEIRDKVKNHATYYADSVKGRFTISRDNSKNTLYLQMNSLRAEDTAVYYCRLGVFDYWGQGTLVTVSS

SEQ ID NO: 434 - protein, 116 aa, Artificial Sequence
  Synthetic Construct
QVQLVQSGAEVKKPGSSVKVSCKASGFTFSDAWMGWVRQAPGQGLEWVAEIRDKVKNHATYYAQKFQGRVTITADESTSTAYMELSSLRSEDTAVYYCRLGVFDYWGQGTLVTVSS

SEQ ID NO: 435 - protein, 116 aa, Artificial Sequence
  Synthetic Construct
QVQLVQSGAEVKKPGASVKVSCKASGFTFSDAWMGWVRQAPGQGLEWVAEIRDKVKNHATYYAQKFQGRVTMTRDTSTSTVYMELSSLRSEDTAVYYCRLGVFDYWGQGTLVTVSS

SEQ ID NO: 436 - protein, 116 aa, Artificial Sequence
  Synthetic Construct
EVQLVQSGAEVKKPGESLKISCKGSGFTFSDAWMGWVRQMPGKGLEWVAEIRDKVKNHATYYAPSFQGQVTISADKSISTAYLQWSSLKASDTAMYYCRLGVFDYWGQGTLVTVSS

SEQ ID NO: 437 - protein, 116 aa, Artificial Sequence
  Synthetic Construct
QVQLQESGPGLVKPSETLSLTCTVSGFTFSDAWMGWIRQPPGKGLEWVAEIRDKVKNHATYYAPSLKSRVTISVDTSKNQFSLKLSSVTAADTAVYYCRLGVFDYWGQGTLVTVSS

SEQ ID NO: 438 - protein, 116 aa, Artificial Sequence
  Synthetic Construct
QLQLQESGPGLVKPSETLSLTCTVSGFTFSDAWMGWIRQPPGKGLEWVAEIRDKVKNHATYYAPSLKSRVTISVDTSKNQFSLKLSSVTAADTAVYYCRLGVFDYWGQGTLVTVSS

SEQ ID NO: 439 - protein, 122 aa, Artificial Sequence
  Synthetic Construct
EVQLVESGGGLVQPKGSLKLSCAASGFSFNTYAMNWVRQAPGKGLEWIARIRSKSNNYATYYADSVKDRITCSRDDSENMFYLQLSSLKTEDTAMYYCVRHGDGNLWYIDVWGTGTTVTVST

SEQ ID NO: 440 - protein, 122 aa, Artificial Sequence
  Synthetic Construct
EVQLVESGGGLVKPGGSLRLSCAASGFSFNTYAMNWVRQAPGKGLEWIARIRSKSNNYATYYAAPVKGRFTISRDDSKNTLYLQMNSLKTEDTAVYYCVRHGDGNLWYIDVWGQGTLVTVSS

SEQ ID NO: 441 - protein, 122 aa, Artificial Sequence
  Synthetic Construct
EVQLVESGGGLVQPGGSLRLSCAASGFSFNTYAMNWVRQAPGKGLEWIARIRSKSNNYATYYADSVKGRFTISRDNAKNSLYLQMNSLRAEDTAVYYCVRHGDGNLWYIDVWGQGTLVTVSS

SEQ ID NO: 442 - protein, 122 aa, Artificial Sequence
  Synthetic Construct
EVQLLESGGGLVQPGGSLRLSCAASGFSFNTYAMNWVRQAPGKGLEWIARIRSKSNNYATYYADSVKGRFTISRDNSKNTLYLQMNSLRAEDTAVYYCVRHGDGNLWYIDVWGQGTLVTVSS

SEQ ID NO: 443 - protein, 122 aa, Artificial Sequence
  Synthetic Construct
QVQLVESGGGVVQPGRSLRLSCAASGFSFNTYAMNWVRQAPGKGLEWIARIRSKSNNYATYYADSVKGRFTISRDNSKNTLYLQMNSLRAEDTAVYYCVRHGDGNLWYIDVWGQGTLVTVSS

SEQ ID NO: 444 - protein, 122 aa, Artificial Sequence
  Synthetic Construct
QVQLVQSGAEVKKPGSSVKVSCKASGFSFNTYAMNWVRQAPGQGLEWIARIRSKSNNYATYYAQKFQGRVTITADESTSTAYMELSSLRSEDTAVYYCVRHGDGNLWYIDVWGQGTLVTVSS

SEQ ID NO: 445 - protein, 122 aa, Artificial Sequence
  Synthetic Construct
EVQLVQSGAEVKKPGESLKISCKGSGFSFNTYAMNWVRQMPGKGLEWIARIRSKSNNYATYYAPSFQGQVTISADKSISTAYLQWSSLKASDTAMYYCVRHGDGNLWYIDVWGQGTLVTVSS

SEQ ID NO: 446 - protein, 122 aa, Artificial Sequence
  Synthetic Construct
QVQLVQSGAEVKKPGASVKVSCKASGFSFNTYAMNWVRQAPGQGLEWIARIRSKSNNYATYYAQKFQGRVTMTRDTSTSTVYMELSSLRSEDTAVYYCVRHGDGNLWYIDVWGQGTLVTVSS

SEQ ID NO: 447 - protein, 122 aa, Artificial Sequence
  Synthetic Construct
QVQLQESGPGLVKPSETLSLTCTVSGFSFNTYAMNWIRQPPGKGLEWIARIRSKSNNYATYYAPSLKSRVTISVDTSKNQFSLKLSSVTAADTAVYYCVRHGDGNLWYIDVWGQGTLVTVSS

SEQ ID NO: 448 - protein, 122 aa, Artificial Sequence
  Synthetic Construct
QVQLQESGPGLVKPSQTLSLTCTVSGFSFNTYAMNWIRQPPGKGLEWIARIRSKSNNYATYYAPSLKSRVTISVDTSKNQFSLKLSSVTAADTAVYYCVRHGDGNLWYIDVWGQGTLVTVSS

SEQ ID NO: 449 - protein, 116 aa, Artificial Sequence
  Synthetic Construct
QVQLQQSGAELVKPGASVKLSCKASGYTVSRYWMHWVKQRPGRGLEWIGRIDPNSGGTKYNEKFKTKATLTVDKPSSTAYMQVSSLTSEDSAVYYCVLTGTDFDYWGQGTTLTVSS

SEQ ID NO: 450 - protein, 116 aa, Artificial Sequence
  Synthetic Construct
QVQLVQSGAEVKKPGASVKVSCKASGYTVSRYWMHWVRQAPGQGLEWIGRIDPNSGGTKYNQKFQGRVTMTRDTSTSTVYMELSSLRSEDTAVYYCVLTGTDFDYWGQGTLVTVSS

SEQ ID NO: 451 - protein, 116 aa, Artificial Sequence
  Synthetic Construct
EVQLLESGGGLVQPGGSLRLSCAASGYTVSRYWMHWVRQAPGKGLEWIGRIDPNSGGTKYNDSVKGRFTISRDNSKNTLYLQMNSLRAEDTAVYYCVLTGTDFDYWGQGTLVTVSS

SEQ ID NO: 452 - protein, 116 aa, Artificial Sequence
  Synthetic Construct
QVQLVQSGAEVKKPGSSVKVSCKASGYTVSRYWMHWVRQAPGQGLEWIGRIDPNSGGTKYNQKFQGRVTITADESTSTAYMELSSLRSEDTAVYYCVLTGTDFDYWGQGTLVTVSS

SEQ ID NO: 453 - protein, 116 aa, Artificial Sequence
  Synthetic Construct
EVQLVQSGAEVKKPGESLKISCKGSGYTVSRYWMHWVRQMPGKGLEWIGRIDPNSGGTKYNPSFQGQVTISADKSISTAYLQWSSLKASDTAMYYCVLTGTDFDYWGQGTLVTVSS

SEQ ID NO: 454 - protein, 116 aa, Artificial Sequence
  Synthetic Construct
EVQLVESGGGLVQPGGSLRLSCAASGYTVSRYWMHWVRQAPGKGLEWIGRIDPNSGGTKYNDSVKGRFTISRDNAKNSLYLQMNSLRAEDTAVYYCVLTGTDFDYWGQGTLVTVSS

SEQ ID NO: 455 - protein, 116 aa, Artificial Sequence
  Synthetic Construct
QVQLVESGGGVVQPGRSLRLSCAASGYTVSRYWMHWVRQAPGKGLEWIGRIDPNSGGTKYNDSVKGRFTISRDNSKNTLYLQMNSLRAEDTAVYYCVLTGTDFDYWGQGTLVTVSS

SEQ ID NO: 456 - protein, 116 aa, Artificial Sequence
  Synthetic Construct
QVQLQESGPGLVKPSETLSLTCTVSGYTVSRYWMHWIRQPPGKGLEWIGRIDPNSGGTKYNPSLKSRVTISVDTSKNQFSLKLSSVTAADTAVYYCVLTGTDFDYWGQGTLVTVSS

SEQ ID NO: 457 - protein, 116 aa, Artificial Sequence
  Synthetic Construct
EVQLVESGGGLVKPGGSLRLSCAASGYTVSRYWMHWVRQAPGKGLEWIGRIDPNSGGTKYNAPVKGRFTISRDDSKNTLYLQMNSLKTEDTAVYYCVLTGTDFDYWGQGTLVTVSS

SEQ ID NO: 458 - protein, 116 aa, Artificial Sequence
  Synthetic Construct
QVQLQESGPGLVKPSQTLSLTCTVSGYTVSRYWMHWIRQPPGKGLEWIGRIDPNSGGTKYNPSLKSRVTISVDTSKNQFSLKLSSVTAADTAVYYCVLTGTDFDYWGQGTLVTVSS

SEQ ID NO: 459 - protein, 122 aa, Artificial Sequence
  Synthetic Construct
  VARIANT 1: Xaa = Glutamic acid or Glutamine
XVQLVESGGGLVQPKGSLKLSCAASGFSFNTYAMNWVRQAPGKGLEWIARIRSKSNNYATYYADSVKDRFTCSRDDSENMFYLQLSSLKTEDTAIYYCVRHGDGNLWYIDVWGTGTTVTVSS

SEQ ID NO: 460 - protein, 122 aa, Artificial Sequence
  Synthetic Construct
EVQLVESGGGLVQPKGSLKLSCAASGFSFNTYAMNWVRQAPGKGLEWIARIRSKSNNYATYYADSVKDRFTCSRDDSENMFYLQLSSLKTEDTAMYYCVRHGDGNLWYIDVWGTGTTVTVSS

SEQ ID NO: 461 - protein, 120 aa, Artificial Sequence
  Synthetic Construct
QVQLQQSGAELVKPGASVKMSCKTSGYPFSNFWITWVKQRPGQGLVWIGDIYPGSDNSNYNEKFKTKATLTVDTSSSTAYMHLSSLTSEDSAVYFCAREAYYTNPGFAYWGQGTLVTVST

SEQ ID NO: 462 - protein, 120 aa, Artificial Sequence
  Synthetic Construct
EVQLVQSGAEVKKPGESLKISCKGSGYPFSNFWITWVRQMPGKGLEWIGDIYPGSDNSNYNPSFQGQVTISADKSISTAYLQWSSLKASDTAMYYCAREAYYTNPGFAYWGQGTLVTVSS

SEQ ID NO: 463 - protein, 120 aa, Artificial Sequence
  Synthetic Construct
QVQLVQSGAEVKKPGSSVKVSCKASGYPFSNFWITWVRQAPGQGLEWIGDIYPGSDNSNYNQKFQGRVTITADESTSTAYMELSSLRSEDTAVYYCAREAYYTNPGFAYWGQGTLVTVSS

SEQ ID NO: 464 - protein, 120 aa, Artificial Sequence
  Synthetic Construct
QVQLVQSGAEVKKPGASVKVSCKASGYPFSNFWITWVRQAPGQGLEWIGDIYPGSDNSNYNQKFQGRVTMTRDTSTSTVYMELSSLRSEDTAVYYCAREAYYTNPGFAYWGQGTLVTVSS

SEQ ID NO: 465 - protein, 120 aa, Artificial Sequence
  Synthetic Construct
EVQLVESGGGLVQPGGSLRLSCAASGYPFSNFWITWVRQAPGKGLEWIGDIYPGSDNSNYNDSVKGRFTISRDNAKNSLYLQMNSLRAEDTAVYYCAREAYYTNPGFAYWGQGTLVTVSS

SEQ ID NO: 466 - protein, 120 aa, Artificial Sequence
  Synthetic Construct
QVQLVESGGGVVQPGRSLRLSCAASGYPFSNFWITWVRQAPGKGLEWIGDIYPGSDNSNYNDSVKGRFTISRDNSKNTLYLQMNSLRAEDTAVYYCAREAYYTNPGFAYWGQGTLVTVSS

SEQ ID NO: 467 - protein, 120 aa, Artificial Sequence
  Synthetic Construct
EVQLLESGGGLVQPGGSLRLSCAASGYPFSNFWITWVRQAPGKGLEWIGDIYPGSDNSNYNDSVKGRFTISRDNSKNTLYLQMNSLRAEDTAVYYCAREAYYTNPGFAYWGQGTLVTVSS

SEQ ID NO: 468 - protein, 120 aa, Artificial Sequence
  Synthetic Construct
QVQLQESGPGLVKPSETLSLTCTVSGYPFSNFWITWIRQPPGKGLEWIGDIYPGSDNSNYNPSLKSRVTISVDTSKNQFSLKLSSVTAADTAVYYCAREAYYTNPGFAYWGQGTLVTVSS

SEQ ID NO: 469 - protein, 120 aa, Artificial Sequence
  Synthetic Construct
EVQLVESGGGLVKPGGSLRLSCAASGYPFSNFWITWVRQAPGKGLEWIGDIYPGSDNSNYNAPVKGRFTISRDDSKNTLYLQMNSLKTEDTAVYYCAREAYYTNPGFAYWGQGTLVTVSS

SEQ ID NO: 470 - protein, 120 aa, Artificial Sequence
  Synthetic Construct
QLQLQESGPGLVKPSETLSLTCTVSGYPFSNFWITWIRQPPGKGLEWIGDIYPGSDNSNYNPSLKSRVTISVDTSKNQFSLKLSSVTAADTAVYYCAREAYYTNPGFAYWGQGTLVTVSS

SEQ ID NO: 471 - protein, 120 aa, Artificial Sequence
  Synthetic Construct
  VARIANT 6, 7, 11, 19, 20, 24, 72, 83, 87, 88, 90, 98: Xaa = Glutamic acid or Glutamine
  VARIANT 18: Xaa = Any Amino Acid
EVQLVXXGRGXSQGKGSXXXGRAXRCLTSNTYTQTGVPQGPGKGREWESVIRSKSNNFSTLYADSVKDRFTXSRDDSESLFYXQMSXXKXEDTAMYYXVRHKSNRYPGVYWGQGTIVTVS

SEQ ID NO: 472 - protein, 121 aa, Artificial Sequence
  Synthetic Construct
EVQLVESGGGLVKPGGSLRLSCAASGLTSNTYTQTWVRQAPGKGLEWESVIRSKSNNFSTLYAAPVKGRFTISRDDSKNTLYLQMNSLKTEDTAVYYCVRHKSNRYPGVYWGQGTLVTVSS

SEQ ID NO: 473 - protein, 121 aa, Artificial Sequence
  Synthetic Construct
QVQLVESGGGVVQPGRSLRLSCAASGLTSNTYTQTWVRQAPGKGLEWESVIRSKSNNFSTLYADSVKGRFTISRDNSKNTLYLQMNSLRAEDTAVYYCVRHKSNRYPGVYWGQGTLVTVSS

SEQ ID NO: 474 - protein, 121 aa, Artificial Sequence
  Synthetic Construct
EVQLLESGGGLVQPGGSLRLSCAASGLTSNTYTQTWVRQAPGKGLEWESVIRSKSNNFSTLYADSVKGRFTISRDNSKNTLYLQMNSLRAEDTAVYYCVRHKSNRYPGVYWGQGTLVTVSS

SEQ ID NO: 475 - protein, 121 aa, Artificial Sequence
  Synthetic Construct
QVQLVQSGAEVKKPGASVKVSCKASGLTSNTYTQTWVRQAPGQGLEWESVIRSKSNNFSTLYAQKFQGRVTMTRDTSTSTVYMELSSLRSEDTAVYYCVRHKSNRYPGVYWGQGTLVTVSS

SEQ ID NO: 476 - protein, 121 aa, Artificial Sequence
  Synthetic Construct
EVQLVESGGGLVQPGGSLRLSCAASGLTSNTYTQTWVRQAPGKGLEWESVIRSKSNNFSTLYADSVKGRFTISRDNAKNSLYLQMNSLRAEDTAVYYCVRHKSNRYPGVYWGQGTLVTVSS

SEQ ID NO: 477 - protein, 121 aa, Artificial Sequence
  Synthetic Construct
QVQLVQSGAEVKKPGSSVKVSCKASGLTSNTYTQTWVRQAPGQGLEWESVIRSKSNNFSTLYAQKFQGRVTITADESTSTAYMELSSLRSEDTAVYYCVRHKSNRYPGVYWGQGTLVTVSS

SEQ ID NO: 478 - protein, 121 aa, Artificial Sequence
  Synthetic Construct
EVQLVQSGAEVKKPGESLKISCKGSGLTSNTYTQTWVRQMPGKGLEWESVIRSKSNNFSTLYAPSFQGQVTISADKSISTAYLQWSSLKASDTAMYYCVRHKSNRYPGVYWGQGTLVTVSS

SEQ ID NO: 479 - protein, 121 aa, Artificial Sequence
  Synthetic Construct
QVQLQESGPGLVKPSETLSLTCTVSGLTSNTYTQTWIRQPPGKGLEWESVIRSKSNNFSTLYAPSLKSRVTISVDTSKNQFSLKLSSVTAADTAVYYCVRHKSNRYPGVYWGQGTLVTVSS

SEQ ID NO: 480 - protein, 121 aa, Artificial Sequence
  Synthetic Construct
QLQLQESGPGLVKPSETLSLTCTVSGLTSNTYTQTWIRQPPGKGLEWESVIRSKSNNFSTLYAPSLKSRVTISVDTSKNQFSLKLSSVTAADTAVYYCVRHKSNRYPGVYWGQGTLVTVSS

SEQ ID NO: 481 - protein, 122 aa, Artificial Sequence
  Synthetic Construct
EVKLEESGGGLVQPGGSMKLSCTASGFTFSDAWMDWVRQSPEKGLEWVAEIRNKVNNHATYYAESVKGRFTISRDDSKSTVYLQMNSLRTEDTGIYYCTSLYDGYYLRFAYWGQGTLVTVSA

SEQ ID NO: 482 - protein, 122 aa, Artificial Sequence
  Synthetic Construct
EVQLVESGGGLVKPGGSLRLSCAASGFTFSDAWMDWVRQAPGKGLEWWVAEIRNKVNNHATYYAPVKGRFTISRDDSKNTLYLQMNSLKTEDTAVYYCCTSLYDGYYLRFAWGQGTLVTVSS

SEQ ID NO: 483 - protein, 122 aa, Artificial Sequence
  Synthetic Construct
EVQLVESGGGLVQPGGSLRLSCAASGFTFSDAWMDWVRQAPGKGLEWWVAEIRNKVNNHATYYDSVKGRFTISRDNAKNSLYLQMNSLRAEDTAVYYCCTSLYDGYYLRFAWGQGTLVTVSS

SEQ ID NO: 484 - protein, 122 aa, Artificial Sequence
  Synthetic Construct
EVQLLESGGGLVQPGGSLRLSCAASGFTFSDAWMDWVRQAPGKGLEWWVAEIRNKVNNHATYYDSVKGRFTISRDNSKNTLYLQMNSLRAEDTAVYYCCTSLYDGYYLRFAWGQGTLVTVSS

SEQ ID NO: 485 - protein, 122 aa, Artificial Sequence
  Synthetic Construct
QVQLVESGGGVVQPGRSLRLSCAASGFTFSDAWMDWVRQAPGKGLEWWVAEIRNKVNNHATYYDSVKGRFTISRDNSKNTLYLQMNSLRAEDTAVYYCCTSLYDGYYLRFAWGQGTLVTVSS

SEQ ID NO: 486 - protein, 122 aa, Artificial Sequence
  Synthetic Construct
QVQLVQSGAEVKKPGASVKVSCKASGFTFSDAWMDWVRQAPGQGLEWWVAEIRNKVNNHATYYQKFQGRVTMTRDTSTSTVYMELSSLRSEDTAVYYCCTSLYDGYYLRFAWGQGTLVTVSS

SEQ ID NO: 487 - protein, 122 aa, Artificial Sequence
  Synthetic Construct
QVQLVQSGAEVKKPGSSVKVSCKASGFTFSDAWMDWVRQAPGQGLEWWVAEIRNKVNNHATYYQKFQGRVTITADESTSTAYMELSSLRSEDTAVYYCCTSLYDGYYLRFAWGQGTLVTVSS

SEQ ID NO: 488 - protein, 122 aa, Artificial Sequence
  Synthetic Construct
EVQLVQSGAEVKKPGESLKISCKGSGFTFSDAWMDWVRQMPGKGLEWWVAEIRNKVNNHATYYPSFQGQVTISADKSISTAYLQWSSLKASDTAMYYCCTSLYDGYYLRFAWGQGTLVTVSS

SEQ ID NO: 489 - protein, 122 aa, Artificial Sequence
  Synthetic Construct
QVQLQESGPGLVKPSETLSLTCTVSGFTFSDAWMDWIRQPPGKGLEWWVAEIRNKVNNHATYYPSLKSRVTISVDTSKNQFSLKLSSVTAADTAVYYCCTSLYDGYYLRFAWGQGTLVTVSS

SEQ ID NO: 490 - protein, 122 aa, Artificial Sequence
  Synthetic Construct
QLQLQESGPGLVKPSETLSLTCTVSGFTFSDAWMDWIRQPPGKGLEWWVAEIRNKVNNHATYYPSLKSRVTISVDTSKNQFSLKLSSVTAADTAVYYCCTSLYDGYYLRFAWGQGTLVTVSS

SEQ ID NO: 491 - protein, 102 aa, Artificial Sequence
  Synthetic Construct
  VARIANT 36, 67, 81, 83: Xaa = Glutamic acid or Glutamine
LSCAASGFTFNTYSMNWVRQAPGKGLEWVAHIKTKXNNFATFYADSVKDRFTISRDDSESMLYLQMXNLKTEDTAMYYCVXHXSNNYPFAYWGQGTLVTVSA

SEQ ID NO: 492 - protein, 121 aa, Artificial Sequence
  Synthetic Construct
  VARIANT 55, 100, 102: Xaa = Glutamic acid or Glutamine
EVQLVESGGGLVKPGGSLRLSCAASGFTFNTYSMNWVRQAPGKGLEWVAHIKTKXNNFATFYAAPVKGRFTISRDDSKNTLYLQMNSLKTEDTAVYYCVXHXSNNYPFAYWGQGTLVTVSS

SEQ ID NO: 493 - protein, 121 aa, Artificial Sequence
  Synthetic Construct
  VARIANT 55, 100, 102: Xaa = Glutamic acid or Glutamine
EVQLVESGGGLVQPGGSLRLSCAASGFTFNTYSMNWVRQAPGKGLEWVAHIKTKXNNFATFYADSVKGRFTISRDNAKNSLYLQMNSLRAEDTAVYYCVXHXSNNYPFAYWGQGTLVTVSS

SEQ ID NO: 494 - protein, 121 aa, Artificial Sequence
  Synthetic Construct
  VARIANT 55, 100, 102: Xaa = Glutamic acid or Glutamine
EVQLLESGGGLVQPGGSLRLSCAASGFTFNTYSMNWVRQAPGKGLEWVAHIKTKXNNFATFYADSVKGRFTISRDNSKNTLYLQMNSLRAEDTAVYYCVXHXSNNYPFAYWGQGTLVTVSS

SEQ ID NO: 495 - protein, 121 aa, Artificial Sequence
  Synthetic Construct
  VARIANT 55, 100, 102: Xaa = Glutamic acid or Glutamine
QVQLVESGGGVVQPGRSLRLSCAASGFTFNTYSMNWVRQAPGKGLEWVAHIKTKXNNFATFYADSVKGRFTISRDNSKNTLYLQMNSLRAEDTAVYYCVXHXSNNYPFAYWGQGTLVTVSS

SEQ ID NO: 496 - protein, 121 aa, Artificial Sequence
  Synthetic Construct
  VARIANT 55, 100, 102: Xaa = Glutamic acid or Glutamine
QVQLVQSGAEVKKPGASVKVSCKASGFTFNTYSMNWVRQAPGQGLEWVAHIKTKXNNFATFYAQKFQGRVTMTRDTSTSTVYMELSSLRSEDTAVYYCVXHXSNNYPFAYWGQGTLVTVSS

SEQ ID NO: 497 - protein, 121 aa, Artificial Sequence
  Synthetic Construct
  VARIANT 55, 100, 102: Xaa = Glutamic acid or Glutamine
QVQLVQSGAEVKKPGSSVKVSCKASGFTFNTYSMNWVRQAPGQGLEWVAHIKTKXNNFATFYAQKFQGRVTITADESTSTAYMELSSLRSEDTAVYYCVXHXSNNYPFAYWGQGTLVTVSS

SEQ ID NO: 498 - protein, 121 aa, Artificial Sequence
  Synthetic Construct
  VARIANT 55, 100, 102: Xaa = Glutamic acid or Glutamine
EVQLVQSGAEVKKPGESLKISCKGSGFTFNTYSMNWVRQMPGKGLEWVAHIKTKXNNFATFYAPSFQGQVTISADKSISTAYLQWSSLKASDTAMYYCVXHXSNNYPFAYWGQGTLVTVSS

SEQ ID NO: 499 - protein, 121 aa, Artificial Sequence
  Synthetic Construct
  VARIANT 55, 100, 102: Xaa = Glutamic acid or Glutamine
QVQLQESGPGLVKPSETLSLTCTVSGFTFNTYSMNWIRQPPGKGLEWVAHIKTKXNNFATFYAPSLKSRVTISVDTSKNQFSLKLSSVTAADTAVYYCVXHXSNNYPFAYWGQGTLVTVSS

SEQ ID NO: 500 - protein, 121 aa, Artificial Sequence
  Synthetic Construct
  VARIANT 55, 100, 102: Xaa = Glutamic acid or Glutamine
QVQLQESGPGLVKPSQTLSLTCTVSGFTFNTYSMNWIRQPPGKGLEWVAHIKTKXNNFATFYAPSLKSRVTISVDTSKNQFSLKLSSVTAADTAVYYCVXHXSNNYPFAYWGQGTLVTVSS

SEQ ID NO: 501 - protein, 116 aa, Artificial Sequence
  Synthetic Construct
  VARIANT 91: Xaa = Glutamic acid or Glutamine
QVQLQQSGAVLVKPGASVKLSCKASGYTFTTYWIHWVKQRPGRGPEWIGRNDPNSGGSNYNEKFRNKAILTVDKPSSTAYMQLNSLTSEDXAVYYCVRTNWDGDFWGQGTTLTVSS

SEQ ID NO: 502 - protein, 116 aa, Artificial Sequence
  Synthetic Construct
QVQLVQSGAEVKKPGASVKVSCKASGYTFTTYWIHWVRQAPGQGLEWIGRNDPNSGGSNYNQKFQGRVTMTRDTSTSTVYMELSSLRSEDTAVYYCVRTNWDGDFWGQGTLVTVSS

SEQ ID NO: 503 - protein, 116 aa, Artificial Sequence
  Synthetic Construct
EVQLVQSGAEVKKPGESLKISCKGSGYTFTTYWIHWVRQMPGKGLEWIGRNDPNSGGSNYNPSFQGQVTISADKSISTAYLQWSSLKASDTAMYYCVRTNWDGDFWGQGTLVTVSS

SEQ ID NO: 504 - protein, 116 aa, Artificial Sequence
  Synthetic Construct
QVQLVQSGAEVKKPGSSVKVSCKASGYTFTTYWIHWVRQAPGQGLEWIGRNDPNSGGSNYNQKFQGRVTITADESTSTAYMELSSLRSEDTAVYYCVRTNWDGDFWGQGTLVTVSS

SEQ ID NO: 505 - protein, 116 aa, Artificial Sequence
  Synthetic Construct
EVQLLESGGGLVQPGGSLRLSCAASGYTFTTYWIHWVRQAPGKGLEWIGRNDPNSGGSNYNDSVKGRFTISRDNSKNTLYLQMNSLRAEDTAVYYCVRTNWDGDFWGQGTLVTVSS

SEQ ID NO: 506 - protein, 116 aa, Artificial Sequence
  Synthetic Construct
EVQLVESGGGLVQPGGSLRLSCAASGYTFTTYWIHWVRQAPGKGLEWIGRNDPNSGGSNYNDSVKGRFTISRDNAKNSLYLQMNSLRAEDTAVYYCVRTNWDGDFWGQGTLVTVSS

SEQ ID NO: 507 - protein, 116 aa, Artificial Sequence
  Synthetic Construct
QVQLVESGGGVVQPGRSLRLSCAASGYTFTTYWIHWVRQAPGKGLEWIGRNDPNSGGSNYNDSVKGRFTISRDNSKNTLYLQMNSLRAEDTAVYYCVRTNWDGDFWGQGTLVTVSS

SEQ ID NO: 508 - protein, 116 aa, Artificial Sequence
  Synthetic Construct
QVQLQESGPGLVKPSETLSLTCTVSGYTFTTYWIHWIRQPPGKGLEWIGRNDPNSGGSNYNPSLKSRVTISVDTSKNQFSLKLSSVTAADTAVYYCVRTNWDGDFWGQGTLVTVSS

SEQ ID NO: 509 - protein, 116 aa, Artificial Sequence
  Synthetic Construct
EVQLVESGGGLVKPGGSLRLSCAASGYTFTTYWIHWVRQAPGKGLEWIGRNDPNSGGSNYNAPVKGRFTISRDDSKNTLYLQMNSLKTEDTAVYYCVRTNWDGDFWGQGTLVTVSS

SEQ ID NO: 510 - protein, 116 aa, Artificial Sequence
  Synthetic Construct
QVQLQESGPGLVKPSQTLSLTCTVSGYTFTTYWIHWIRQPPGKGLEWIGRNDPNSGGSNYNPSLKSRVTISVDTSKNQFSLKLSSVTAADTAVYYCVRTNWDGDFWGQGTLVTVSS

SEQ ID NO: 511 - protein, 126 aa, Artificial Sequence
  Synthetic Construct
EVQLQQSGAELVKPGASVKISCKASGYAFSNYWMSWVKQRPGKGLEWIGQIYPGDGDTKYNGKFEGKATLTADKSSSTAYMQLSSLTSEDSAVYFCSREKGADYYGSTYSAWFSYWGQGTLVTVSA

SEQ ID NO: 512 - protein, 126 aa, Artificial Sequence
  Synthetic Construct
EVQLVQSGAEVKKPGESLKISCKGSGYAFSNYWMSWVRQMPGKGLEWIGQIYPGDGDTKYNPSFQGQVTISADKSISTAYLQWSSLKASDTAMYYCSREKGADYYGSTYSAWFSYWGQGTLVTVSS

SEQ ID NO: 513 - protein, 126 aa, Artificial Sequence
  Synthetic Construct
QVQLVQSGAEVKKPGASVKVSCKASGYAFSNYWMSWVRQAPGQGLEWIGQIYPGDGDTKYNQKFQGRVTMTRDTSTSTVYMELSSLRSEDTAVYYCSREKGADYYGSTYSAWFSYWGQGTLVTVSS

SEQ ID NO: 514 - protein, 126 aa, Artificial Sequence
  Synthetic Construct
EVQLLESGGGLVQPGGSLRLSCAASGYAFSNYWMSWVRQAPGKGLEWIGQIYPGDGDTKYNDSVKGRFTISRDNSKNTLYLQMNSLRAEDTAVYYCSREKGADYYGSTYSAWFSYWGQGTLVTVSS

SEQ ID NO: 515 - protein, 126 aa, Artificial Sequence
  Synthetic Construct
QVQLVQSGAEVKKPGSSVKVSCKASGYAFSNYWMSWVRQAPGQGLEWIGQIYPGDGDTKYNQKFQGRVTITADESTSTAYMELSSLRSEDTAVYYCSREKGADYYGSTYSAWFSYWGQGTLVTVSS

SEQ ID NO: 516 - protein, 126 aa, Artificial Sequence
  Synthetic Construct
EVQLVESGGGLVQPGGSLRLSCAASGYAFSNYWMSWVRQAPGKGLEWIGQIYPGDGDTKYNDSVKGRFTISRDNAKNSLYLQMNSLRAEDTAVYYCSREKGADYYGSTYSAWFSYWGQGTLVTVSS

SEQ ID NO: 517 - protein, 126 aa, Artificial Sequence
  Synthetic Construct
QVQLVESGGGVVQPGRSLRLSCAASGYAFSNYWMSWVRQAPGKGLEWIGQIYPGDGDTKYNDSVKGRFTISRDNSKNTLYLQMNSLRAEDTAVYYCSREKGADYYGSTYSAWFSYWGQGTLVTVSS

SEQ ID NO: 518 - protein, 126 aa, Artificial Sequence
  Synthetic Construct
QVQLQESGPGLVKPSETLSLTCTVSGYAFSNYWMSWIRQPPGKGLEWIGQIYPGDGDTKYNPSLKSRVTISVDTSKNQFSLKLSSVTAADTAVYYCSREKGADYYGSTYSAWFSYWGQGTLVTVSS

SEQ ID NO: 519 - protein, 126 aa, Artificial Sequence
  Synthetic Construct
EVQLVESGGGLVKPGGSLRLSCAASGYAFSNYWMSWVRQAPGKGLEWIGQIYPGDGDTKYNAPVKGRFTISRDDSKNTLYLQMNSLKTEDTAVYYCSREKGADYYGSTYSAWFSYWGQGTLVTVSS

SEQ ID NO: 520 - protein, 126 aa, Artificial Sequence
  Synthetic Construct
QVQLQESGPGLVKPSQTLSLTCTVSGYAFSNYWMSWIRQPPGKGLEWIGQIYPGDGDTKYNPSLKSRVTISVDTSKNQFSLKLSSVTAADTAVYYCSREKGADYYGSTYSAWFSYWGQGTLVTVSS

SEQ ID NO: 521 - protein, 123 aa, Artificial Sequence
  Synthetic Construct
QVQLQQSGPELVKPGASLKISCKASGYAFSSSWMNWVKQRPGKGLEWIGRIYPGDGDTNYNGEFRVRATLTADTSSTTAYMQLSSLTSEDSAVYFCARLLRNQPGESYAMDYWGQGASVTVSS

SEQ ID NO: 522 - protein, 123 aa, Artificial Sequence
  Synthetic Construct
EVQLVQSGAEVKKPGESLKISCKGSGYAFSSSWMNWVRQMPGKGLEWIGRIYPGDGDTNYNPSFQGQVTISADKSISTAYLQWSSLKASDTAMYYCARLLRNQPGESYAMDYWGQGTLVTVSS

SEQ ID NO: 523 - protein, 123 aa, Artificial Sequence
  Synthetic Construct
QVQLVQSGAEVKKPGASVKVSCKASGYAFSSSWMNWVRQAPGQGLEWIGRIYPGDGDTNYNQKFQGRVTMTRDTSTSTVYMELSSLRSEDTAVYYCARLLRNQPGESYAMDYWGQGTLVTVSS

SEQ ID NO: 524 - protein, 123 aa, Artificial Sequence
  Synthetic Construct
QVQLVQSGAEVKKPGSSVKVSCKASGYAFSSSWMNWVRQAPGQGLEWIGRIYPGDGDTNYNQKFQGRVTITADESTSTAYMELSSLRSEDTAVYYCARLLRNQPGESYAMDYWGQGTLVTVSS

SEQ ID NO: 525 - protein, 123 aa, Artificial Sequence
  Synthetic Construct
EVQLLESGGGLVQPGGSLRLSCAASGYAFSSSWMNWVRQAPGKGLEWIGRIYPGDGDTNYNDSVKGRFTISRDNSKNTLYLQMNSLRAEDTAVYYCARLLRNQPGESYAMDYWGQGTLVTVSS

SEQ ID NO: 526 - protein, 123 aa, Artificial Sequence
  Synthetic Construct
EVQLVESGGGLVQPGGSLRLSCAASGYAFSSSWMNWVRQAPGKGLEWIGRIYPGDGDTNYNDSVKGRFTISRDNAKNSLYLQMNSLRAEDTAVYYCARLLRNQPGESYAMDYWGQGTLVTVSS

SEQ ID NO: 527 - protein, 123 aa, Artificial Sequence
  Synthetic Construct
QVQLVESGGGVVQPGRSLRLSCAASGYAFSSSWMNWVRQAPGKGLEWIGRIYPGDGDTNYNDSVKGRFTISRDNSKNTLYLQMNSLRAEDTAVYYCARLLRNQPGESYAMDYWGQGTLVTVSS

SEQ ID NO: 528 - protein, 123 aa, Artificial Sequence
  Synthetic Construct
QVQLQESGPGLVKPSETLSLTCTVSGYAFSSSWMNWIRQPPGKGLEWIGRIYPGDGDTNYNPSLKSRVTISVDTSKNQFSLKLSSVTAADTAVYYCARLLRNQPGESYAMDYWGQGTLVTVSS

SEQ ID NO: 529 - protein, 123 aa, Artificial Sequence
  Synthetic Construct
EVQLVESGGGLVKPGGSLRLSCAASGYAFSSSWMNWVRQAPGKGLEWIGRIYPGDGDTNYNAPVKGRFTISRDDSKNTLYLQMNSLKTEDTAVYYCARLLRNQPGESYAMDYWGQGTLVTVSS

SEQ ID NO: 530 - protein, 123 aa, Artificial Sequence
  Synthetic Construct
QVQLQESGPGLVKPSQTLSLTCTVSGYAFSSSWMNWIRQPPGKGLEWIGRIYPGDGDTNYNPSLKSRVTISVDTSKNQFSLKLSSVTAADTAVYYCARLLRNQPGESYAMDYWGQGTLVTVSS

SEQ ID NO: 531 - protein, 116 aa, Artificial Sequence
  Synthetic Construct
QVQLQQSGAELVKPGASVKLSCKASGYIFTTYWIHWVKQRPGRGPEWIGRIDPNNGDTNYNEKFKTKATLTVDKPSSTADMQLSSLTSEDSAVYYCVMTGTDFDYWGQGTTLTVSS

SEQ ID NO: 532 - protein, 116 aa, Artificial Sequence
  Synthetic Construct
EVQLVQSGAEVKKPGESLKISCKGSGYIFTTYWIHWVRQMPGKGLEWIGRIDPNNGDTNYNPSFQGQVTISADKSISTAYLQWSSLKASDTAMYYCVMTGTDFDYWGQGTLVTVSS

SEQ ID NO: 533 - protein, 116 aa, Artificial Sequence
  Synthetic Construct
QVQLVQSGAEVKKPGASVKVSCKASGYIFTTYWIHWVRQAPGQGLEWIGRIDPNNGDTNYNQKFQGRVTMTRDTSTSTVYMELSSLRSEDTAVYYCVMTGTDFDYWGQGTLVTVSS

SEQ ID NO: 534 - protein, 116 aa, Artificial Sequence
  Synthetic Construct
QVQLVQSGAEVKKPGSSVKVSCKASGYIFTTYWIHWVRQAPGQGLEWIGRIDPNNGDTNYNQKFQGRVTITADESTSTAYMELSSLRSEDTAVYYCVMTGTDFDYWGQGTLVTVSS

SEQ ID NO: 535 - protein, 116 aa, Artificial Sequence
  Synthetic Construct
EVQLLESGGGLVQPGGSLRLSCAASGYIFTTYWIHWVRQAPGKGLEWIGRIDPNNGDTNYNDSVKGRFTISRDNSKNTLYLQMNSLRAEDTAVYYCVMTGTDFDYWGQGTLVTVSS

SEQ ID NO: 536 - protein, 116 aa, Artificial Sequence
  Synthetic Construct
QVQLVESGGGVVQPGRSLRLSCAASGYIFTTYWIHWVRQAPGKGLEWIGRIDPNNGDTNYNDSVKGRFTISRDNSKNTLYLQMNSLRAEDTAVYYCVMTGTDFDYWGQGTLVTVSS

SEQ ID NO: 537 - protein, 116 aa, Artificial Sequence
  Synthetic Construct
EVQLVESGGGLVQPGGSLRLSCAASGYIFTTYWIHWVRQAPGKGLEWIGRIDPNNGDTNYNDSVKGRFTISRDNAKNSLYLQMNSLRAEDTAVYYCVMTGTDFDYWGQGTLVTVSS

SEQ ID NO: 538 - protein, 116 aa, Artificial Sequence
  Synthetic Construct
QVQLQESGPGLVKPSETLSLTCTVSGYIFTTYWIHWIRQPPGKGLEWIGRIDPNNGDTNYNPSLKSRVTISVDTSKNQFSLKLSSVTAADTAVYYCVMTGTDFDYWGQGTLVTVSS

SEQ ID NO: 539 - protein, 116 aa, Artificial Sequence
  Synthetic Construct
EVQLVESGGGLVKPGGSLRLSCAASGYIFTTYWIHWVRQAPGKGLEWIGRIDPNNGDTNYNAPVKGRFTISRDDSKNTLYLQMNSLKTEDTAVYYCVMTGTDFDYWGQGTLVTVSS

SEQ ID NO: 540 - protein, 116 aa, Artificial Sequence
  Synthetic Construct
QVQLQESGPGLVKPSQTLSLTCTVSGYIFTTYWIHWIRQPPGKGLEWIGRIDPNNGDTNYNPSLKSRVTISVDTSKNQFSLKLSSVTAADTAVYYCVMTGTDFDYWGQGTLVTVSS

SEQ ID NO: 541 - protein, 120 aa, Artificial Sequence
  Synthetic Construct
QVQLQQSGAEVVKPGASVKMSCKTSGYPFSNFWITWVKQRPGQGLVWIGDIYPGSDNRNFNERFKTKATLTVDTSSSTAYMHLSSLTSEDSAVYFCAREAYYTNPGFAYWGQGTLVTVSA

SEQ ID NO: 542 - protein, 120 aa, Artificial Sequence
  Synthetic Construct
EVQLVQSGAEVKKPGESLKISCKGSGYPFSNFWITWVRQMPGKGLEWIGDIYPGSDNRNFNPSFQGQVTISADKSISTAYLQWSSLKASDTAMYYCAREAYYTNPGFAYWGQGTLVTVSS

SEQ ID NO: 543 - protein, 120 aa, Artificial Sequence
  Synthetic Construct
QVQLVQSGAEVKKPGSSVKVSCKASGYPFSNFWITWVRQAPGQGLEWIGDIYPGSDNRNFNQKFQGRVTITADESTSTAYMELSSLRSEDTAVYYCAREAYYTNPGFAYWGQGTLVTVSS

SEQ ID NO: 544 - protein, 120 aa, Artificial Sequence
  Synthetic Construct
QVQLVQSGAEVKKPGASVKVSCKASGYPFSNFWITWVRQAPGQGLEWIGDIYPGSDNRNFNQKFQGRVTMTRDTSTSTVYMELSSLRSEDTAVYYCAREAYYTNPGFAYWGQGTLVTVSS

SEQ ID NO: 545 - protein, 120 aa, Artificial Sequence
  Synthetic Construct
EVQLVESGGGLVQPGGSLRLSCAASGYPFSNFWITWVRQAPGKGLEWIGDIYPGSDNRNFNDSVKGRFTISRDNAKNSLYLQMNSLRAEDTAVYYCAREAYYTNPGFAYWGQGTLVTVSS

SEQ ID NO: 546 - protein, 120 aa, Artificial Sequence
  Synthetic Construct
QVQLVESGGGVVQPGRSLRLSCAASGYPFSNFWITWVRQAPGKGLEWIGDIYPGSDNRNFNDSVKGRFTISRDNSKNTLYLQMNSLRAEDTAVYYCAREAYYTNPGFAYWGQGTLVTVSS

SEQ ID NO: 547 - protein, 120 aa, Artificial Sequence
  Synthetic Construct
EVQLLESGGGLVQPGGSLRLSCAASGYPFSNFWITWVRQAPGKGLEWIGDIYPGSDNRNFNDSVKGRFTISRDNSKNTLYLQMNSLRAEDTAVYYCAREAYYTNPGFAYWGQGTLVTVSS

SEQ ID NO: 548 - protein, 120 aa, Artificial Sequence
  Synthetic Construct
QVQLQESGPGLVKPSETLSLTCTVSGYPFSNFWITWIRQPPGKGLEWIGDIYPGSDNRNFNPSLKSRVTISVDTSKNQFSLKLSSVTAADTAVYYCAREAYYTNPGFAYWGQGTLVTVSS

SEQ ID NO: 549 - protein, 120 aa, Artificial Sequence
  Synthetic Construct
EVQLVESGGGLVKPGGSLRLSCAASGYPFSNFWITWVRQAPGKGLEWIGDIYPGSDNRNFNAPVKGRFTISRDDSKNTLYLQMNSLKTEDTAVYYCAREAYYTNPGFAYWGQGTLVTVSS

SEQ ID NO: 550 - protein, 120 aa, Artificial Sequence
  Synthetic Construct
QLQLQESGPGLVKPSETLSLTCTVSGYPFSNFWITWIRQPPGKGLEWIGDIYPGSDNRNFNPSLKSRVTISVDTSKNQFSLKLSSVTAADTAVYYCAREAYYTNPGFAYWGQGTLVTVSS

SEQ ID NO: 551 - protein, 122 aa, Artificial Sequence
  Synthetic Construct
EVQLVESGGRLVQPKGSLKLSCAASGFNFNTYAMNWVRQAPGKGLEWVARIRSKSNNYATYYADSVKDRFTISRDDSESMLYLQMNNLKTEDTAMYYCVRHYSNYGWGFAYWGQGTLVTVSA

SEQ ID NO: 552 - protein, 122 aa, Artificial Sequence
  Synthetic Construct
EVQLVESGGGLVKPGGSLRLSCAASGFNFNTYAMNWVRQAPGKGLEWVARIRSKSNNYATYYAAPVKGRFTISRDDSKNTLYLQMNSLKTEDTAVYYCVRHYSNYGWGFAYWGQGTLVTVSS

SEQ ID NO: 553 - protein, 122 aa, Artificial Sequence
  Synthetic Construct
EVQLVESGGGLVQPGGSLRLSCAASGFNFNTYAMNWVRQAPGKGLEWVARIRSKSNNYATYYADSVKGRFTISRDNAKNSLYLQMNSLRAEDTAVYYCVRHYSNYGWGFAYWGQGTLVTVSS

SEQ ID NO: 554 - protein, 122 aa, Artificial Sequence
  Synthetic Construct
EVQLLESGGGLVQPGGSLRLSCAASGFNFNTYAMNWVRQAPGKGLEWVARIRSKSNNYATYYADSVKGRFTISRDNSKNTLYLQMNSLRAEDTAVYYCVRHYSNYGWGFAYWGQGTLVTVSS

SEQ ID NO: 555 - protein, 122 aa, Artificial Sequence
  Synthetic Construct
QVQLVESGGGVVQPGRSLRLSCAASGFNFNTYAMNWVRQAPGKGLEWVARIRSKSNNYATYYADSVKGRFTISRDNSKNTLYLQMNSLRAEDTAVYYCVRHYSNYGWGFAYWGQGTLVTVSS

SEQ ID NO: 556 - protein, 122 aa, Artificial Sequence
  Synthetic Construct
QVQLVQSGAEVKKPGSSVKVSCKASGFNFNTYAMNWVRQAPGQGLEWVARIRSKSNNYATYYAQKFQGRVTITADESTSTAYMELSSLRSEDTAVYYCVRHYSNYGWGFAYWGQGTLVTVSS

SEQ ID NO: 557 - protein, 122 aa, Artificial Sequence
  Synthetic Construct
QVQLVQSGAEVKKPGASVKVSCKASGFNFNTYAMNWVRQAPGQGLEWVARIRSKSNNYATYYAQKFQGRVTMTRDTSTSTVYMELSSLRSEDTAVYYCVRHYSNYGWGFAYWGQGTLVTVSS

SEQ ID NO: 558 - protein, 122 aa, Artificial Sequence
  Synthetic Construct
EVQLVQSGAEVKKPGESLKISCKGSGFNFNTYAMNWVRQMPGKGLEWVARIRSKSNNYATYYAPSFQGQVTISADKSISTAYLQWSSLKASDTAMYYCVRHYSNYGWGFAYWGQGTLVTVSS

SEQ ID NO: 559 - protein, 122 aa, Artificial Sequence
  Synthetic Construct
QVQLQESGPGLVKPSETLSLTCTVSGFNFNTYAMNWIRQPPGKGLEWVARIRSKSNNYATYYAPSLKSRVTISVDTSKNQFSLKLSSVTAADTAVYYCVRHYSNYGWGFAYWGQGTLVTVSS

SEQ ID NO: 560 - protein, 122 aa, Artificial Sequence
  Synthetic Construct
QLQLQESGPGLVKPSETLSLTCTVSGFNFNTYAMNWIRQPPGKGLEWVARIRSKSNNYATYYAPSLKSRVTISVDTSKNQFSLKLSSVTAADTAVYYCVRHYSNYGWGFAYWGQGTLVTVSS

SEQ ID NO: 561 - protein, 113 aa, Artificial Sequence
  Synthetic Construct
  VARIANT 95: Xaa = Glutamic acid or Glutamine
QVQLQQYGPELVKPGASVKMSCKVSGYTFSDYYIHWMKQSHGKSLEWIGYIYPNNGDNGYNQEFKGKATLTVDKSSSTAYMELRSLTFEDSAVYXCARRGYYGGSYDYWGQGT

SEQ ID NO: 562 - protein, 119 aa, Artificial Sequence
  Synthetic Construct
QVQLVQSGAEVKKPGASVKVSCKASGYTFSDYYIHWVRQAPGQGLEWIGYIYPNNGDNGYNQKFQGRVTMTRDTSTSTVYMELSSLRSEDTAVYYCARRGYYGGSYDYWGQGTLVTVSS

SEQ ID NO: 563 - protein, 119 aa, Artificial Sequence
  Synthetic Construct
EVQLVQSGAEVKKPGESLKISCKGSGYTFSDYYIHWVRQMPGKGLEWIGYIYPNNGDNGYNPSFQGQVTISADKSISTAYLQWSSLKASDTAMYYCARRGYYGGSYDYWGQGTLVTVSS

SEQ ID NO: 564 - protein, 119 aa, Artificial Sequence
  Synthetic Construct
QVQLVQSGAEVKKPGSSVKVSCKASGYTFSDYYIHWVRQAPGQGLEWIGYIYPNNGDNGYNQKFQGRVTITADESTSTAYMELSSLRSEDTAVYYCARRGYYGGSYDYWGQGTLVTVSS

SEQ ID NO: 565 - protein, 119 aa, Artificial Sequence
  Synthetic Construct
EVQLVESGGGLVQPGGSLRLSCAASGYTFSDYYIHWVRQAPGKGLEWIGYIYPNNGDNGYNDSVKGRFTISRDNAKNSLYLQMNSLRAEDTAVYYCARRGYYGGSYDYWGQGTLVTVSS

SEQ ID NO: 566 - protein, 119 aa, Artificial Sequence
  Synthetic Construct
QVQLVESGGGVVQPGRSLRLSCAASGYTFSDYYIHWVRQAPGKGLEWIGYIYPNNGDNGYNDSVKGRFTISRDNSKNTLYLQMNSLRAEDTAVYYCARRGYYGGSYDYWGQGTLVTVSS

SEQ ID NO: 567 - protein, 119 aa, Artificial Sequence
  Synthetic Construct
EVQLLESGGGLVQPGGSLRLSCAASGYTFSDYYIHWVRQAPGKGLEWIGYIYPNNGDNGYNDSVKGRFTISRDNSKNTLYLQMNSLRAEDTAVYYCARRGYYGGSYDYWGQGTLVTVSS

SEQ ID NO: 568 - protein, 119 aa, Artificial Sequence
  Synthetic Construct
QVQLQESGPGLVKPSETLSLTCTVSGYTFSDYYIHWIRQPPGKGLEWIGYIYPNNGDNGYNPSLKSRVTISVDTSKNQFSLKLSSVTAADTAVYYCARRGYYGGSYDYWGQGTLVTVSS

SEQ ID NO: 569 - protein, 119 aa, Artificial Sequence
  Synthetic Construct
EVQLVESGGGLVKPGGSLRLSCAASGYTFSDYYIHWVRQAPGKGLEWIGYIYPNNGDNGYNAPVKGRFTISRDDSKNTLYLQMNSLKTEDTAVYYCARRGYYGGSYDYWGQGTLVTVSS

SEQ ID NO: 570 - protein, 119 aa, Artificial Sequence
  Synthetic Construct
QVQLQESGPGLVKPSQTLSLTCTVSGYTFSDYYIHWIRQPPGKGLEWIGYIYPNNGDNGYNPSLKSRVTISVDTSKNQFSLKLSSVTAADTAVYYCARRGYYGGSYDYWGQGTLVTVSS

SEQ ID NO: 571 - protein, 113 aa, Artificial Sequence
  Synthetic Construct
WRIGQGKGSLKLARAARGFRFNTYAMTRVRQGPGKGREWEGVIRRKSSNFATLYADSVKDRFRASRDDSESMLYVQMSNWKQEDTAMYYGVRHKSNKYPFVYWGQGTLVTVSA

SEQ ID NO: 572 - protein, 121 aa, Artificial Sequence
  Synthetic Construct
EVQLVESGGGLVKPGGSLRLSCAASGFRFNTYAMTWVRQAPGKGLEWEGVIRRKSSNFATLYAAPVKGRFTISRDDSKNTLYLQMNSLKTEDTAVYYCVRHKSNKYPFVYWGQGTLVTVSS

SEQ ID NO: 573 - protein, 121 aa, Artificial Sequence
  Synthetic Construct
EVQLLESGGGLVQPGGSLRLSCAASGFRFNTYAMTWVRQAPGKGLEWEGVIRRKSSNFATLYADSVKGRFTISRDNSKNTLYLQMNSLRAEDTAVYYCVRHKSNKYPFVYWGQGTLVTVSS

SEQ ID NO: 574 - protein, 121 aa, Artificial Sequence
  Synthetic Construct
EVQLVESGGGLVQPGGSLRLSCAASGFRFNTYAMTWVRQAPGKGLEWEGVIRRKSSNFATLYADSVKGRFTISRDNAKNSLYLQMNSLRAEDTAVYYCVRHKSNKYPFVYWGQGTLVTVSS

SEQ ID NO: 575 - protein, 121 aa, Artificial Sequence
  Synthetic Construct
QVQLVESGGGVVQPGRSLRLSCAASGFRFNTYAMTWVRQAPGKGLEWEGVIRRKSSNFATLYADSVKGRFTISRDNSKNTLYLQMNSLRAEDTAVYYCVRHKSNKYPFVYWGQGTLVTVSS

SEQ ID NO: 576 - protein, 121 aa, Artificial Sequence
  Synthetic Construct
QVQLVQSGAEVKKPGSSVKVSCKASGFRFNTYAMTWVRQAPGQGLEWEGVIRRKSSNFATLYAQKFQGRVTITADESTSTAYMELSSLRSEDTAVYYCVRHKSNKYPFVYWGQGTLVTVSS

SEQ ID NO: 577 - protein, 121 aa, Artificial Sequence
  Synthetic Construct
QVQLVQSGAEVKKPGASVKVSCKASGFRFNTYAMTWVRQAPGQGLEWEGVIRRKSSNFATLYAQKFQGRVTMTRDTSTSTVYMELSSLRSEDTAVYYCVRHKSNKYPFVYWGQGTLVTVSS

SEQ ID NO: 578 - protein, 121 aa, Artificial Sequence
  Synthetic Construct
EVQLVQSGAEVKKPGESLKISCKGSGFRFNTYAMTWVRQMPGKGLEWEGVIRRKSSNFATLYAPSFQGQVTISADKSISTAYLQWSSLKASDTAMYYCVRHKSNKYPFVYWGQGTLVTVSS

SEQ ID NO: 579 - protein, 121 aa, Artificial Sequence
  Synthetic Construct
QVQLQESGPGLVKPSETLSLTCTVSGFRFNTYAMTWIRQPPGKGLEWEGVIRRKSSNFATLYAPSLKSRVTISVDTSKNQFSLKLSSVTAADTAVYYCVRHKSNKYPFVYWGQGTLVTVSS

SEQ ID NO: 580 - protein, 121 aa, Artificial Sequence
  Synthetic Construct
QLQLQESGPGLVKPSETLSLTCTVSGFRFNTYAMTWIRQPPGKGLEWEGVIRRKSSNFATLYAPSLKSRVTISVDTSKNQFSLKLSSVTAADTAVYYCVRHKSNKYPFVYWGQGTLVTVSS

SEQ ID NO: 581 - protein, 17 aa, Artificial Sequence
  Synthetic Construct
KSSQSVFYSSNQKNYLA

SEQ ID NO: 582 - protein, 8 aa, Artificial Sequence
  Synthetic Construct
HQYLSSLT

SEQ ID NO: 583 - protein, 9 aa, Artificial Sequence
  Synthetic Construct
SQSTHVPPT

SEQ ID NO: 584 - protein, 9 aa, Artificial Sequence
  Synthetic Construct
YSFTGYYMH

SEQ ID NO: 585 - protein, 16 aa, Artificial Sequence
  Synthetic Construct
VAEIRNKINNHATYYA

SEQ ID NO: 586 - protein, 14 aa, Artificial Sequence
  Synthetic Construct
IGGINPNNGGTSYK

SEQ ID NO: 587 - protein, 14 aa, Artificial Sequence
  Synthetic Construct
IGRVNPNNGGTSYN

SEQ ID NO: 588 - protein, 13 aa, Artificial Sequence
  Synthetic Construct
TSLYDGSYLRFAY

SEQ ID NO: 589 - protein, 9 aa, Artificial Sequence
  Synthetic Construct
VLTGGYFDY

SEQ ID NO: 590 - protein, 20 aa, Artificial Sequence
  Synthetic Construct
QTQSPSSLAVSAGEKVTLSC

SEQ ID NO: 591 - protein, 40 aa, Artificial Sequence
  Synthetic Construct
QTQVFLSLLLWVSGTCGNIMLTQSPSSLAVSAGEKVTLSC

SEQ ID NO: 592 - protein, 23 aa, Artificial Sequence
  Synthetic Construct
DIVMSQSPSSLAVSVGEKVTMSC

SEQ ID NO: 593 - protein, 15 aa, Artificial Sequence
  Synthetic Construct
WYQQKPGQSPKLLIS

SEQ ID NO: 594 - protein, 32 aa, Artificial Sequence
  Synthetic Construct
GVPDRFTGSGFGTDFTLTISSVQGEDLAVYYC

SEQ ID NO: 595 - protein, 32 aa, Artificial Sequence
  Synthetic Construct
GVPDRFTGSGSGTDFTLTINSVQAEDLAVYYC

SEQ ID NO: 596 - protein, 30 aa, Artificial Sequence
  Synthetic Construct
GVQSEVKFEESGGGLVQPGGSMKLSCTASG

SEQ ID NO: 597 - protein, 26 aa, Artificial Sequence
  Synthetic Construct
QVQLQQSGPELVKPGASVKISCKTSG

SEQ ID NO: 598 - protein, 26 aa, Artificial Sequence
  Synthetic Construct
QVQLQQSGPDLVKPGASVKISCKASG

SEQ ID NO: 599 - protein, 35 aa, Artificial Sequence
  Synthetic Construct
ESVKGRFTISRDDSKSSVSLQMNSLRTEDTGIYYC

SEQ ID NO: 600 - protein, 35 aa, Artificial Sequence
  Synthetic Construct
QKFKGKATLTVDRSSSTAYMELRSLTSEDSAVYYC

SEQ ID NO: 601 - protein, 35 aa, Artificial Sequence
  Synthetic Construct
QKFKGKAILTVDKSSSTAYMELRSLTSEDSAVYYC

SEQ ID NO: 602 - protein, 129 aa, Artificial Sequence
  Synthetic Construct
QTQVFLSLLLWVSGTCGNIMLTQSPSSLAVSAGEKVTLSCKSSQSVFYSSNQKNYLAWYQQKPGQSPKLLISWASTRESGVPDRFTGSGSGTDFTLTINSVQAEDLAVYYCHQYLSSLTFGAGTKLELK

SEQ ID NO: 603 - protein, 112 aa, Artificial Sequence
  Synthetic Construct
DIVMTQSPDSLAVSLGERATINCKSSQSVFYSSNQKNYLAWYQQKPGQPPKLLIYWASTRESGVPDRFSGSGSGTDFTLTISSLQAEDVAVYYCHQYLSSLTFGQGTKVEIK

SEQ ID NO: 604 - protein, 112 aa, Artificial Sequence
  Synthetic Construct
DVVMTQSPLSLPVTLGQPASISCKSSQSVFYSSNQKNYLAWFQQRPGQSPRRLIYWASTRESGVPDRFSGSGSGTDFTLKISRVEAEDVGVYYCHQYLSSLTFGQGTKVEIK

SEQ ID NO: 605 - protein, 112 aa, Artificial Sequence
  Synthetic Construct
DIVMTQSPLSLPVTPGEPASISCKSSQSVFYSSNQKNYLAWYLQKPGQSPQLLIYWASTRESGVPDRFSGSGSGTDFTLKISRVEAEDVGVYYCHQYLSSLTFGQGTKVEIK

SEQ ID NO: 606 - protein, 112 aa, Artificial Sequence
  Synthetic Construct
DIQMTQSPSTLSASVGDRVTITCKSSQSVFYSSNQKNYLAWYQQKPGKAPKLLIYWASTRESGVPSRFSGSGSGTEFTLTISSLQPDDFATYYCHQYLSSLTFGQGTKVEIK

SEQ ID NO: 607 - protein, 112 aa, Artificial Sequence
  Synthetic Construct
EIVMTQSPATLSVSPGERATLSCKSSQSVFYSSNQKNYLAWYQQKPGQAPRLLIYWASTRESGIPARFSGSGSGTEFTLTISSLQSEDFAVYYCHQYLSSLTFGQGTKVEIK

SEQ ID NO: 608 - protein, 112 aa, Artificial Sequence
  Synthetic Construct
DIQLTQSPSFLSASVGDRVTITCKSSQSVFYSSNQKNYLAWYQQKPGKAPKLLIYWASTRESGVPSRFSGSGSGTEFTLTISSLQPEDFATYYCHQYLSSLTFGQGTKVEIK

SEQ ID NO: 609 - protein, 112 aa, Artificial Sequence
  Synthetic Construct
EIVLTQSPATLSLSPGERATLSCKSSQSVFYSSNQKNYLAWYQQKPGQAPRLLIYWASTRESGIPARFSGSGSGTDFTLTISSLEPEDFAVYYCHQYLSSLTFGQGTKVEIK

SEQ ID NO: 610 - protein, 112 aa, Artificial Sequence
  Synthetic Construct
DIQMTQSPSSLSASVGDRVTITCKSSQSVFYSSNQKNYLAWYQQKPGKAPKLLIYWASTRESGVPSRFSGSGSGTDFTLTISSLQPEDFATYYCHQYLSSLTFGQGTKVEIK

SEQ ID NO: 611 - protein, 112 aa, Artificial Sequence
  Synthetic Construct
DIQMTQSPSSLSASVGDRVTITCKSSQSVFYSSNQKNYLAWYQQKPGKAPKLLIYWASTRESGVPSRFSGSGSGTDFTFTISSLQPEDIATYYCHQYLSSLTFGQGTKVEIK

SEQ ID NO: 612 - protein, 112 aa, Artificial Sequence
  Synthetic Construct
EIVLTQSPGTLSLSPGERATLSCKSSQSVFYSSNQKNYLAWYQQKPGQAPRLLIYWASTRESGIPDRFSGSGSGTDFTLTISRLEPEDFAVYYCHQYLSSLTFGQGTKVEIK

SEQ ID NO: 613 - protein, 113 aa, Artificial Sequence
  Synthetic Construct
DIVMSQSPSSLAVSVGEKVTMSCKSSQSLLYSSNQKNCLAWYQQKPGQSPKLLIYWASTRESGVPDRFTGSGSGTDFTLTISSVKAEDLAVYYCQQYYSYPLTFGAGTKLELK

SEQ ID NO: 614 - protein, 113 aa, Artificial Sequence
  Synthetic Construct
DIVMTQSPDSLAVSLGERATINCKSSQSLLYSSNQKNCLAWYQQKPGQPPKLLIYWASTRESGVPDRFSGSGSGTDFTLTISSLQAEDVAVYYCQQYYSYPLTFGQGTKVEIK

SEQ ID NO: 615 - protein, 113 aa, Artificial Sequence
  Synthetic Construct
DIVMTQSPLSLPVTPGEPASISCKSSQSLLYSSNQKNCLAWYLQKPGQSPQLLIYWASTRESGVPDRFSGSGSGTDFTLKISRVEAEDVGVYYCQQYYSYPLTFGQGTKVEIK

SEQ ID NO: 616 - protein, 113 aa, Artificial Sequence
  Synthetic Construct
DVVMTQSPLSLPVTLGQPASISCKSSQSLLYSSNQKNCLAWFQQRPGQSPRRLIYWASTRESGVPDRFSGSGSGTDFTLKISRVEAEDVGVYYCQQYYSYPLTFGQGTKVEIK

SEQ ID NO: 617 - protein, 113 aa, Artificial Sequence
  Synthetic Construct
DIQLTQSPSFLSASVGDRVTITCKSSQSLLYSSNQKNCLAWYQQKPGKAPKLLIYWASTRESGVPSRFSGSGSGTEFTLTISSLQPEDFATYYCQQYYSYPLTFGQGTKVEIK

SEQ ID NO: 618 - protein, 113 aa, Artificial Sequence
  Synthetic Construct
EIVMTQSPATLSVSPGERATLSCKSSQSLLYSSNQKNCLAWYQQKPGQAPRLLIYWASTRESGIPARFSGSGSGTEFTLTISSLQSEDFAVYYCQQYYSYPLTFGQGTKVEIK

SEQ ID NO: 619 - protein, 113 aa, Artificial Sequence
  Synthetic Construct
DIQMTQSPSTLSASVGDRVTITCKSSQSLLYSSNQKNCLAWYQQKPGKAPKLLIYWASTRESGVPSRFSGSGSGTEFTLTISSLQPDDFATYYCQQYYSYPLTFGQGTKVEIK

SEQ ID NO: 620 - protein, 113 aa, Artificial Sequence
  Synthetic Construct
DIQMTQSPSSLSASVGDRVTITCKSSQSLLYSSNQKNCLAWYQQKPGKAPKLLIYWASTRESGVPSRFSGSGSGTDFTFTISSLQPEDIATYYCQQYYSYPLTFGQGTKVEIK

SEQ ID NO: 621 - protein, 113 aa, Artificial Sequence
  Synthetic Construct
DIQMTQSPSSLSASVGDRVTITCKSSQSLLYSSNQKNCLAWYQQKPGKAPKLLIYWASTRESGVPSRFSGSGSGTDFTLTISSLQPEDFATYYCQQYYSYPLTFGQGTKVEIK

SEQ ID NO: 622 - protein, 113 aa, Artificial Sequence
  Synthetic Construct
EIVLTQSPATLSLSPGERATLSCKSSQSLLYSSNQKNCLAWYQQKPGQAPRLLIYWASTRESGIPARFSGSGSGTDFTLTISSLEPEDFAVYYCQQYYSYPLTFGQGTKVEIK

SEQ ID NO: 623 - protein, 113 aa, Artificial Sequence
  Synthetic Construct
EIVLTQSPGTLSLSPGERATLSCKSSQSLLYSSNQKNCLAWYQQKPGQAPRLLIYWASTRESGIPDRFSGSGSGTDFTLTISRLEPEDFAVYYCQQYYSYPLTFGQGTKVEIK

SEQ ID NO: 624 - protein, 112 aa, Artificial Sequence
  Synthetic Construct
DVVMTQTPLSLPVSLGDQASISCRSSQSLVHSNGNTYLHWYLQKPGQSPKLLIYKVSNRFSGVPDRFSGSGSGTDFTLKISRVEAEDLGVYFCSQSTHVPPTFGSGTKLEIK

SEQ ID NO: 625 - protein, 112 aa, Artificial Sequence
  Synthetic Construct
DVVMTQSPLSLPVTLGQPASISCRSSQSLVHSNGNTYLHWFQQRPGQSPRRLIYKVSNRFSGVPDRFSGSGSGTDFTLKISRVEAEDVGVYYCSQSTHVPPTFGQGTKVEIK

SEQ ID NO: 626 - protein, 112 aa, Artificial Sequence
  Synthetic Construct
DIVMTQSPLSLPVTPGEPASISCRSSQSLVHSNGNTYLHWYLQKPGQSPQLLIYKVSNRFSGVPDRFSGSGSGTDFTLKISRVEAEDVGVYYCSQSTHVPPTFGQGTKVEIK

SEQ ID NO: 627 - protein, 112 aa, Artificial Sequence
  Synthetic Construct
DIVMTQSPDSLAVSLGERATINCRSSQSLVHSNGNTYLHWYQQKPGQPPKLLIYKVSNRFSGVPDRFSGSGSGTDFTLTISSLQAEDVAVYYCSQSTHVPPTFGQGTKVEIK

SEQ ID NO: 628 - protein, 112 aa, Artificial Sequence
  Synthetic Construct
EIVLTQSPATLSLSPGERATLSCRSSQSLVHSNGNTYLHWYQQKPGQAPRLLIYKVSNRFSGIPARFSGSGSGTDFTLTISSLEPEDFAVYYCSQSTHVPPTFGQGTKVEIK

SEQ ID NO: 629 - protein, 112 aa, Artificial Sequence
  Synthetic Construct
DIQMTQSPSSLSASVGDRVTITCRSSQSLVHSNGNTYLHWYQQKPGKAPKLLIYKVSNRFSGVPSRFSGSGSGTDFTFTISSLQPEDIATYYCSQSTHVPPTFGQGTKVEIK

SEQ ID NO: 630 - protein, 112 aa, Artificial Sequence
  Synthetic Construct
DIQMTQSPSTLSASVGDRVTITCRSSQSLVHSNGNTYLHWYQQKPGKAPKLLIYKVSNRFSGVPSRFSGSGSGTEFTLTISSLQPDDFATYYCSQSTHVPPTFGQGTKVEIK

SEQ ID NO: 631 - protein, 112 aa, Artificial Sequence
  Synthetic Construct
DIQMTQSPSSLSASVGDRVTITCRSSQSLVHSNGNTYLHWYQQKPGKAPKLLIYKVSNRFSGVPSRFSGSGSGTDFTLTISSLQPEDFATYYCSQSTHVPPTFGQGTKVEIK

SEQ ID NO: 632 - protein, 112 aa, Artificial Sequence
  Synthetic Construct
DIQLTQSPSFLSASVGDRVTITCRSSQSLVHSNGNTYLHWYQQKPGKAPKLLIYKVSNRFSGVPSRFSGSGSGTEFTLTISSLQPEDFATYYCSQSTHVPPTFGQGTKVEIK

SEQ ID NO: 633 - protein, 112 aa, Artificial Sequence
  Synthetic Construct
EIVMTQSPATLSVSPGERATLSCRSSQSLVHSNGNTYLHWYQQKPGQAPRLLIYKVSNRFSGIPARFSGSGSGTEFTLTISSLQSEDFAVYYCSQSTHVPPTFGQGTKVEIK

SEQ ID NO: 634 - protein, 112 aa, Artificial Sequence
  Synthetic Construct
EIVLTQSPGTLSLSPGERATLSCRSSQSLVHSNGNTYLHWYQQKPGQAPRLLIYKVSNRFSGIPDRFSGSGSGTDFTLTISRLEPEDFAVYYCSQSTHVPPTFGQGTKVEIK

SEQ ID NO: 635 - protein, 117 aa, Artificial Sequence; identical to SEQ ID NO: 355
  Synthetic Construct

SEQ ID NO: 636 - protein, 121 aa, Artificial Sequence
  Synthetic Construct
EVQLVESGGGLVKPGGSLRLSCAASGFNFNTYAMKWVRQAPGKGLEWIARIRSNSNDYATNYSAPVKGRFTISRDDSKNTLYLQMNSLKTEDTAVYYCVGHKINNYPFAHWGQGTLVTVSS

SEQ ID NO: 637 - protein, 121 aa, Artificial Sequence
  Synthetic Construct
EVQLLESGGGLVQPGGSLRLSCAASGFNFNTYAMKWVRQAPGKGLEWIARIRSNSNDYATNYSDSVKGRFTISRDNSKNTLYLQMNSLRAEDTAVYYCVGHKINNYPFAHWGQGTLVTVSS

SEQ ID NO: 638 - protein, 121 aa, Artificial Sequence
  Synthetic Construct
QVQLVESGGGVVQPGRSLRLSCAASGFNFNTYAMKWVRQAPGKGLEWIARIRSNSNDYATNYSDSVKGRFTISRDNSKNTLYLQMNSLRAEDTAVYYCVGHKINNYPFAHWGQGTLVTVSS

SEQ ID NO: 639 - protein, 121 aa, Artificial Sequence
  Synthetic Construct
EVQLVESGGGLVQPGGSLRLSCAASGFNFNTYAMKWVRQAPGKGLEWIARIRSNSNDYATNYSDSVKGRFTISRDNAKNSLYLQMNSLRAEDTAVYYCVGHKINNYPFAHWGQGTLVTVSS

SEQ ID NO: 640 - protein, 121 aa, Artificial Sequence; identical to SEQ ID NO: 639
  Synthetic Construct

SEQ ID NO: 641 - protein, 121 aa, Artificial Sequence
  Synthetic Construct
QVQLVQSGAEVKKPGSSVKVSCKASGFNFNTYAMKWVRQAPGQGLEWIARIRSNSNDYATNYSQKFQGRVTITADESTSTAYMELSSLRSEDTAVYYCVGHKINNYPFAHWGQGTLVTVSS

SEQ ID NO: 642 - protein, 121 aa, Artificial Sequence
  Synthetic Construct
QVQLVQSGAEVKKPGASVKVSCKASGFNFNTYAMKWVRQAPGQGLEWIARIRSNSNDYATNYSQKFQGRVTMTRDTSTSTVYMELSSLRSEDTAVYYCVGHKINNYPFAHWGQGTLVTVSS

SEQ ID NO: 643 - protein, 121 aa, Artificial Sequence
  Synthetic Construct
EVQLVQSGAEVKKPGESLKISCKGSGFNFNTYAMKWVRQMPGKGLEWIARIRSNSNDYATNYSPSFQGQVTISADKSISTAYLQWSSLKASDTAMYYCVGHKINNYPFAHWGQGTLVTVSS

SEQ ID NO: 644 - protein, 121 aa, Artificial Sequence
  Synthetic Construct
QVQLQESGPGLVKPSETLSLTCTVSGFNFNTYAMKWIRQPPGKGLEWIARIRSNSNDYATNYSPSLKSRVTISVDTSKNQFSLKLSSVTAADTAVYYCVGHKINNYPFAHWGQGTLVTVSS

SEQ ID NO: 645 - protein, 121 aa, Artificial Sequence
  Synthetic Construct
QVQLQESGPGLVKPSQTLSLTCTVSGFNFNTYAMKWIRQPPGKGLEWIARIRSNSNDYATNYSPSLKSRVTISVDTSKNQFSLKLSSVTAADTAVYYCVGHKINNYPFAHWGQGTLVTVSS

SEQ ID NO: 646 - protein, 126 aa, Artificial Sequence
  Synthetic Construct
GVQSEVKFEESGGGLVQPGGSMKLSCTASGFTFSDAWMDWVRQSPEKGLEWVAEIRNKINNHATYYAESVKGRFTISRDDSKSSVSLQMNSLRTEDTGIYYCTSLYDGSYLRFAYWGQGTLVTVSA

SEQ ID NO: 647 - protein, 122 aa, Artificial Sequence
  Synthetic Construct
EVQLVESGGGLVKPGGSLRLSCAASGFTFSDAWMDWVRQAPGKGLEWVAEIRNKINNHATYYAAPVKGRFTISRDDSKNTLYLQMNSLKTEDTAVYYCTSLYDGSYLRFAYWGQGTLVTVSS

SEQ ID NO: 648 - protein, 122 aa, Artificial Sequence
  Synthetic Construct
EVQLVESGGGLVQPGGSLRLSCAASGFTFSDAWMDWVRQAPGKGLEWVAEIRNKINNHATYYADSVKGRFTISRDNAKNSLYLQMNSLRAEDTAVYYCTSLYDGSYLRFAYWGQGTLVTVSS

SEQ ID NO: 649 - protein, 122 aa, Artificial Sequence
  Synthetic Construct
EVQLLESGGGLVQPGGSLRLSCAASGFTFSDAWMDWVRQAPGKGLEWVAEIRNKINNHATYYADSVKGRFTISRDNSKNTLYLQMNSLRAEDTAVYYCTSLYDGSYLRFAYWGQGTLVTVSS

SEQ ID NO: 650 - protein, 122 aa, Artificial Sequence
  Synthetic Construct
QVQLVESGGGVVQPGRSLRLSCAASGFTFSDAWMDWVRQAPGKGLEWVAEIRNKINNHATYYADSVKGRFTISRDNSKNTLYLQMNSLRAEDTAVYYCTSLYDGSYLRFAYWGQGTLVTVSS

SEQ ID NO: 651 - protein, 122 aa, Artificial Sequence; identical to SEQ ID NO: 648
  Synthetic Construct

SEQ ID NO: 652 - protein, 122 aa, Artificial Sequence
  Synthetic Construct
QVQLVQSGAEVKKPGSSVKVSCKASGFTFSDAWMDWVRQAPGQGLEWVAEIRNKINNHATYYAQKFQGRVTITADESTSTAYMELSSLRSEDTAVYYCTSLYDGSYLRFAYWGQGTLVTVSS

SEQ ID NO: 653 - protein, 122 aa, Artificial Sequence
  Synthetic Construct
QVQLVQSGAEVKKPGASVKVSCKASGFTFSDAWMDWVRQAPGQGLEWVAEIRNKINNHATYYAQKFQGRVTMTRDTSTSTVYMELSSLRSEDTAVYYCTSLYDGSYLRFAYWGQGTLVTVSS

SEQ ID NO: 654 - protein, 122 aa, Artificial Sequence
  Synthetic Construct
EVQLVQSGAEVKKPGESLKISCKGSGFTFSDAWMDWVRQMPGKGLEWVAEIRNKINNHATYYAPSFQGQVTISADKSISTAYLQWSSLKASDTAMYYCTSLYDGSYLRFAYWGQGTLVTVSS

SEQ ID NO: 655 - protein, 122 aa, Artificial Sequence
  Synthetic Construct
QVQLQESGPGLVKPSETLSLTCTVSGFTFSDAWMDWIRQPPGKGLEWVAEIRNKINNHATYYAPSLKSRVTISVDTSKNQFSLKLSSVTAADTAVYYCTSLYDGSYLRFAYWGQGTLVTVSS

SEQ ID NO: 656 - protein, 122 aa, Artificial Sequence
  Synthetic Construct
QVQLQESGPGLVKPSQTLSLTCTVSGFTFSDAWMDWIRQPPGKGLEWVAEIRNKINNHATYYAPSLKSRVTISVDTSKNQFSLKLSSVTAADTAVYYCTSLYDGSYLRFAYWGQGTLVTVSS

SEQ ID NO: 657 - protein, 119 aa, Artificial Sequence
  Synthetic Construct
QVQLQQSGPELVKPGASVKISCKTSGYTFTEYTMHWVKQSHGKSLEWIGGINPNNGGTSYKQKFKGKATLTVDRSSSTAYMELRSLTSEDSAVYYCARGGSHYYAMDYWGQGTSVTVSS

SEQ ID NO: 658 - protein, 119 aa, Artificial Sequence
  Synthetic Construct
QVQLVQSGAEVKKPGASVKVSCKASGYTFTEYTMHWVRQAPGQGLEWIGGINPNNGGTSYKQKFQGRVTMTRDTSTSTVYMELSSLRSEDTAVYYCARGGSHYYAMDYWGQGTLVTVSS

SEQ ID NO: 659 - protein, 119 aa, Artificial Sequence
  Synthetic Construct
QVQLVQSGAEVKKPGSSVKVSCKASGYTFTEYTMHWVRQAPGQGLEWIGGINPNNGGTSYKQKFQGRVTITADESTSTAYMELSSLRSEDTAVYYCARGGSHYYAMDYWGQGTLVTVSS

SEQ ID NO: 660 - protein, 119 aa, Artificial Sequence
  Synthetic Construct
EVQLVQSGAEVKKPGESLKISCKGSGYTFTEYTMHWVRQMPGKGLEWIGGINPNNGGTSYKPSFQGQVTISADKSISTAYLQWSSLKASDTAMYYCARGGSHYYAMDYWGQGTLVTVSS

SEQ ID NO: 661 - protein, 119 aa, Artificial Sequence
  Synthetic Construct
EVQLLESGGGLVQPGGSLRLSCAASGYTFTEYTMHWVRQAPGKGLEWIGGINPNNGGTSYKDSVKGRFTISRDNSKNTLYLQMNSLRAEDTAVYYCARGGSHYYAMDYWGQGTLVTVSS

SEQ ID NO: 662 - protein, 119 aa, Artificial Sequence
  Synthetic Construct
QVQLVESGGGVVQPGRSLRLSCAASGYTFTEYTMHWVRQAPGKGLEWIGGINPNNGGTSYKDSVKGRFTISRDNSKNTLYLQMNSLRAEDTAVYYCARGGSHYYAMDYWGQGTLVTVSS

SEQ ID NO: 663 - protein, 119 aa, Artificial Sequence
  Synthetic Construct
EVQLVESGGGLVQPGGSLRLSCAASGYTFTEYTMHWVRQAPGKGLEWIGGINPNNGGTSYKDSVKGRFTISRDNAKNSLYLQMNSLRAEDTAVYYCARGGSHYYAMDYWGQGTLVTVSS

SEQ ID NO: 664 - protein, 119 aa, Artificial Sequence; identical to SEQ ID NO: 663
  Synthetic Construct

SEQ ID NO: 665 - protein, 119 aa, Artificial Sequence
  Synthetic Construct
QVQLQESGPGLVKPSETLSLTCTVSGYTFTEYTMHWIRQPPGKGLEWIGGINPNNGGTSYKPSLKSRVTISVDTSKNQFSLKLSSVTAADTAVYYCARGGSHYYAMDYWGQGTLVTVSS

SEQ ID NO: 666 - protein, 119 aa, Artificial Sequence
  Synthetic Construct
EVQLVESGGGLVKPGGSLRLSCAASGYTFTEYTMHWVRQAPGKGLEWIGGINPNNGGTSYKAPVKGRFTISRDDSKNTLYLQMNSLKTEDTAVYYCARGGSHYYAMDYWGQGTLVTVSS

SEQ ID NO: 667 - protein, 119 aa, Artificial Sequence
  Synthetic Construct
QLQLQESGPGLVKPSETLSLTCTVSGYTFTEYTMHWIRQPPGKGLEWIGGINPNNGGTSYKPSLKSRVTISVDTSKNQFSLKLSSVTAADTAVYYCARGGSHYYAMDYWGQGTLVTVSS

SEQ ID NO: 668 - protein, 116 aa, Artificial Sequence
  Synthetic Construct
QVQLQQSGPDLVKPGASVKISCKASGYSFTGYYMHWVKQSHGKSLEWIGRVNPNNGGTSYNQKFKGKAILTVDKSSSTAYMELRSLTSEDSAVYYCVLTGGYFDYWGQGTTLTVSS

SEQ ID NO: 669 - protein, 116 aa, Artificial Sequence
  Synthetic Construct
QVQLVQSGAEVKKPGASVKVSCKASGYSFTGYYMHWVRQAPGQGLEWIGRVNPNNGGTSYNQKFQGRVTMTRDTSTSTVYMELSSLRSEDTAVYYCVLTGGYFDYWGQGTLVTVSS

SEQ ID NO: 670 - protein, 116 aa, Artificial Sequence
  Synthetic Construct
EVQLVQSGAEVKKPGESLKISCKGSGYSFTGYYMHWVRQMPGKGLEWIGRVNPNNGGTSYNPSFQGQVTISADKSISTAYLQWSSLKASDTAMYYCVLTGGYFDYWGQGTLVTVSS

SEQ ID NO: 671 - protein, 116 aa, Artificial Sequence
  Synthetic Construct
EVQLLESGGGLVQPGGSLRLSCAASGYSFTGYYMHWVRQAPGKGLEWIGRVNPNNGGTSYNDSVKGRFTISRDNSKNTLYLQMNSLRAEDTAVYYCVLTGGYFDYWGQGTLVTVSS

SEQ ID NO: 672 - protein, 116 aa, Artificial Sequence
  Synthetic Construct
QVQLVQSGAEVKKPGSSVKVSCKASGYSFTGYYMHWVRQAPGQGLEWIGRVNPNNGGTSYNQKFQGRVTITADESTSTAYMELSSLRSEDTAVYYCVLTGGYFDYWGQGTLVTVSS

SEQ ID NO: 673 - protein, 116 aa, Artificial Sequence
  Synthetic Construct
QVQLVESGGGVVQPGRSLRLSCAASGYSFTGYYMHWVRQAPGKGLEWIGRVNPNNGGTSYNDSVKGRFTISRDNSKNTLYLQMNSLRAEDTAVYYCVLTGGYFDYWGQGTLVTVSS

SEQ ID NO: 674 - protein, 116 aa, Artificial Sequence
  Synthetic Construct
EVQLVESGGGLVQPGGSLRLSCAASGYSFTGYYMHWVRQAPGKGLEWIGRVNPNNGGTSYNDSVKGRFTISRDNAKNSLYLQMNSLRAEDTAVYYCVLTGGYFDYWGQGTLVTVSS

SEQ ID NO: 675 - protein, 116 aa, Artificial Sequence; identical to SEQ ID NO: 674
  Synthetic Construct

SEQ ID NO: 676 - protein, 116 aa, Artificial Sequence
  Synthetic Construct
QVQLQESGPGLVKPSETLSLTCTVSGYSFTGYYMHWIRQPPGKGLEWIGRVNPNNGGTSYNPSLKSRVTISVDTSKNQFSLKLSSVTAADTAVYYCVLTGGYFDYWGQGTLVTVSS

SEQ ID NO: 677 - protein, 116 aa, Artificial Sequence
  Synthetic Construct
EVQLVESGGGLVKPGGSLRLSCAASGYSFTGYYMHWVRQAPGKGLEWIGRVNPNNGGTSYNAPVKGRFTISRDDSKNTLYLQMNSLKTEDTAVYYCVLTGGYFDYWGQGTLVTVSS

SEQ ID NO: 678 - protein, 116 aa, Artificial Sequence
  Synthetic Construct
QLQLQESGPGLVKPSETLSLTCTVSGYSFTGYYMHWIRQPPGKGLEWIGRVNPNNGGTSYNPSLKSRVTISVDTSKNQFSLKLSSVTAADTAVYYCVLTGGYFDYWGQGTLVTVSS

SEQ ID NO: 679 - protein, 109 aa, Artificial Sequence
  Synthetic Construct
QTQSPSSLAVSAGEKVTLSCKSSQSVFYSSNQKNYLAWYQQKPGQSPKLLISWASTRESGVPDRFTGSGFGTDFTLTISSVQGEDLAVYYCHQYLSSLTFGAGTKLELK

SEQ ID NO: 680 - protein, 112 aa, Artificial Sequence; identical to SEQ ID NO: 603
  Synthetic Construct

SEQ ID NO: 681 - protein, 112 aa, Artificial Sequence; identical to SEQ ID NO: 605
  Synthetic Construct

SEQ ID NO: 682 - protein, 112 aa, Artificial Sequence; identical to SEQ ID NO: 604
  Synthetic Construct

SEQ ID NO: 683 - protein, 112 aa, Artificial Sequence; identical to SEQ ID NO: 606
  Synthetic Construct

SEQ ID NO: 684 - protein, 112 aa, Artificial Sequence; identical to SEQ ID NO: 608
  Synthetic Construct

SEQ ID NO: 685 - protein, 112 aa, Artificial Sequence; identical to SEQ ID NO: 607
  Synthetic Construct

SEQ ID NO: 686 - protein, 112 aa, Artificial Sequence; identical to SEQ ID NO: 611
  Synthetic Construct

SEQ ID NO: 687 - protein, 112 aa, Artificial Sequence; identical to SEQ ID NO: 609
  Synthetic Construct

SEQ ID NO: 688 - protein, 112 aa, Artificial Sequence; identical to SEQ ID NO: 610
  Synthetic Construct

SEQ ID NO: 689 - protein, 112 aa, Artificial Sequence; identical to SEQ ID NO: 612
  Synthetic Construct

SEQ ID NO: 690 - protein, 9 aa, Artificial Sequence
  Synthetic Construct
SQDVSTTVA

SEQ ID NO: 691 - protein, 14 aa, Artificial Sequence
  Synthetic Construct
SQSIVHSNGNTYLE

SEQ ID NO: 692 - protein, 9 aa, Artificial Sequence
  Synthetic Construct
SQGVSTAVA

SEQ ID NO: 693 - protein, 9 aa, Artificial Sequence
  Synthetic Construct
SQDVRTAVA

SEQ ID NO: 694 - protein, 9 aa, Artificial Sequence
  Synthetic Construct
SENVVTYVS

SEQ ID NO: 695 - protein, 7 aa, Artificial Sequence
  Synthetic Construct
SASYRYT

SEQ ID NO: 696 - protein, 7 aa, Artificial Sequence
  Synthetic Construct
WASTRHT

SEQ ID NO: 697 - protein, 7 aa, Artificial Sequence
  Synthetic Construct
GASNRYT

SEQ ID NO: 698 - protein, 9 aa, Artificial Sequence
  Synthetic Construct
QQHYSTPPT

SEQ ID NO: 699 - protein, 9 aa, Artificial Sequence
  Synthetic Construct
FQGSHVPFT

SEQ ID NO: 700 - protein, 8 aa, Artificial Sequence
  Synthetic Construct
HQHYSTYT

SEQ ID NO: 701 - protein, 10 aa, Artificial Sequence
  Synthetic Construct
QQHYGTPPWT

SEQ ID NO: 702 - protein, 9 aa, Artificial Sequence
  Synthetic Construct
GQGYSYPYT

SEQ ID NO: 703 - protein, 11 aa, Artificial Sequence
  Synthetic Construct
SRFTFSSYAMS

SEQ ID NO: 704 - protein, 11 aa, Artificial Sequence
  Synthetic Construct
SAFSLTNYAVH

SEQ ID NO: 705 - protein, 11 aa, Artificial Sequence
  Synthetic Construct
SRFTFSSYAVS

SEQ ID NO: 706 - protein, 14 aa, Artificial Sequence
  Synthetic Construct
VAAISGGGRYTYYP

SEQ ID NO: 707 - protein, 13 aa, Artificial Sequence
  Synthetic Construct
LGVIWSGGSTAFN

SEQ ID NO: 708 - protein, 14 aa, Artificial Sequence
  Synthetic Construct
VATISGGGRYTYYP

SEQ ID NO: 709 - protein, 10 aa, Artificial Sequence
  Synthetic Construct
ARHYDGYLDY

SEQ ID NO: 710 - protein, 13 aa, Artificial Sequence
  Synthetic Construct
ATHYYRSTYAFSY

SEQ ID NO: 711 - protein, 25 aa, Artificial Sequence
  Synthetic Construct
DIVMTQSHKFMSTSVGDRVSITCKA

SEQ ID NO: 712 - protein, 25 aa, Artificial Sequence
  Synthetic Construct
DVLMTQTPLSLPVSLGDQASISCRS

SEQ ID NO: 713 - protein, 25 aa, Artificial Sequence
  Synthetic Construct
DIVMTQSHKFMSTSIGARVSITCKA

SEQ ID NO: 714 - protein, 25 aa, Artificial Sequence
  Synthetic Construct
DIVMTQSPKSMSMSVGERVTLTCKA

SEQ ID NO: 715 - protein, 32 aa, Artificial Sequence
  Synthetic Construct
GVPDRFTGSGFGTDFTFTISSVQAEDLAVYYC

SEQ ID NO: 716 - protein, 32 aa, Artificial Sequence
  Synthetic Construct
GVPDRFTGSGSGTDYTLTISSVQAEDLALYYC

SEQ ID NO: 717 - protein, 32 aa, Artificial Sequence
  Synthetic Construct
GVPDRFTGSGSATDFTLTISSVQAEDLADYHC

SEQ ID NO: 718 - protein, 32 aa, Artificial Sequence
  Synthetic Construct
GVPDRFTGSGSGTDFTFTISSVQAEDLAVYYC

SEQ ID NO: 719 - protein, 24 aa, Artificial Sequence
  Synthetic Construct
EVQLVESGGGLVKPGGSLKLSCEA

SEQ ID NO: 720 - protein, 24 aa, Artificial Sequence
  Synthetic Construct
QVQLQESGPGLVQPSQSLSIICTV

SEQ ID NO: 721 - protein, 12 aa, Artificial Sequence
  Synthetic Construct
WIRQSPGKGLEW

SEQ ID NO: 722 - protein, 35 aa, Artificial Sequence
  Synthetic Construct
DSMKGRFTISRDNAKNFLYLQMSSLRSEDTAMYYC

SEQ ID NO: 723 - protein, 35 aa, Artificial Sequence
  Synthetic Construct
AAFISRLNISKDNSKSQVFFKMNSLQSDDTAIYYC

SEQ ID NO: 724 - protein, 107 aa, Artificial Sequence
  Synthetic Construct
DIVMTQSHKFMSTSVGDRVSITCKASQDVSTTVAWYQQKPGQSPKLLIYSASYRYTGVPDRFTGSGFGTDFTFTISSVQAEDLAVYYCQQHYSTPPTFGGGTKLEIK

SEQ ID NO: 725 - protein, 112 aa, Artificial Sequence
  Synthetic Construct
DVLMTQTPLSLPVSLGDQASISCRSSQSIVHSNGNTYLEWYLQKPGQSPKLLIYKVSNRFSGVPDRFSGSGSGTDFTLKISRVEAEDLGVYYCFQGSHVPFTFGSGTKLEIK

SEQ ID NO: 726 - protein, 106 aa, Artificial Sequence
  Synthetic Construct
DIVMTQSHKFMSTSVGDRVSITCKASQGVSTAVAWYQQKPGQSPKLLIYWASTRHTGVPDRFTGSGSGTDYTLTISSVQAEDLALYYCHQHYSTYTFGGGTKLEIK

SEQ ID NO: 727 - protein, 108 aa, Artificial Sequence
  Synthetic Construct
DIVMTQSHKFMSTSIGARVSITCKASQDVRTAVAWYQQKPGQSPKLLIYSASYRYTGVPDRFTGSGFGTDFTFTISSVQAEDLAVYYCQQHYGTPPWTFGGGTKLEIK

SEQ ID NO: 728 - protein, 107 aa, Artificial Sequence
  Synthetic Construct
DIVMTQSPKSMSMSVGERVTLTCKASENVVTYVSWYQQKPEQSPKLLIYGASNRYTGVPDRFTGSGSATDFTLTISSVQAEDLADYHCGQGYSYPYTFGGGTKLEIK

SEQ ID NO: 729 - protein, 108 aa, Artificial Sequence
  Synthetic Construct
DIVMTQSHKFMSTSIGARVSITCKASQDVRTAVAWYQQKPGQSPKLLIYSASYRYTGVPDRFTGSGSGTDFTFTISSVQAEDLAVYYCQQHYGTPPWTFGGGTKLEIK

SEQ ID NO: 730 - protein, 107 aa, Artificial Sequence
  Synthetic Construct
DIVMTQSHKFMSTSVGDRVSITCKASQDVSTTVAWYQQKPGQSPKLLIYSASYRYTGVPDRFTGSGSGTDFTFTISSVQAEDLAVYYCQQHYSTPPTFGGGTKLEIK

SEQ ID NO: 731 - protein, 117 aa, Artificial Sequence
  Synthetic Construct
EVQLVESGGGLVKPGGSLKLSCEASRFTFSSYAMSWVRQTPEKRLEWVAAISGGGRYTYYPDSMKGRFTISRDNAKNFLYLQMSSLRSEDTAMYYCARHYDGYLDYWGQGTTLTVSS

SEQ ID NO: 732 - protein, 119 aa, Artificial Sequence
  Synthetic Construct
QVQLQESGPGLVQPSQSLSIICTVSAFSLTNYAVHWIRQSPGKGLEWLGVIWSGGSTAFNAAFISRLNISKDNSKSQVFFKMNSLQSDDTAIYYCATHYYRSTYAFSYWGQGTLVTVSA

SEQ ID NO: 733 - protein, 117 aa, Artificial Sequence
  Synthetic Construct
EVQLVESGGGLVKPGGSLKLSCEASRFTFSSYAVSWVRQTPEKRLEWVATISGGGRYTYYPDSMKGRFTISRDNAKNFLYLQMSSLRSEDTAMYYCARHYDGYLDYWGQGTTLTVSS

SEQ ID NO: 734 - protein, 14 aa, Artificial Sequence
  Synthetic Construct
SQSLVHSNGNTYLH

SEQ ID NO: 735 - protein, 14 aa, Artificial Sequence
  Synthetic Construct
SQSLVHSNGDTYLH

SEQ ID NO: 736 - protein, 13 aa, Artificial Sequence
  Synthetic Construct
SESVDYHGTSLMQ

SEQ ID NO: 737 - protein, 9 aa, Artificial Sequence
  Synthetic Construct
  VARIANT 5: Xaa = Glutamic acid or Glutamine
SENIXYSLA

SEQ ID NO: 738 - protein, 11 aa, Artificial Sequence
  Synthetic Construct
RASQSIGTSIH

SEQ ID NO: 739 - protein, 7 aa, Artificial Sequence
  Synthetic Construct
KVSNRVS

SEQ ID NO: 740 - protein, 7 aa, Artificial Sequence
  Synthetic Construct
KVSDRFS

SEQ ID NO: 741 - protein, 7 aa, Artificial Sequence
  Synthetic Construct
AASNVES

SEQ ID NO: 742 - protein, 7 aa, Artificial Sequence
  Synthetic Construct
NANSLED

SEQ ID NO: 743 - protein, 7 aa, Artificial Sequence
  Synthetic Construct
FASESIS

SEQ ID NO: 744 - protein, 9 aa, Artificial Sequence
  Synthetic Construct
QQNRKILWT

SEQ ID NO: 745 - protein, 9 aa, Artificial Sequence
  Synthetic Construct
KQAYDVPWT

SEQ ID NO: 746 - protein, 9 aa, Artificial Sequence
  Synthetic Construct
QQTNTWPIT

SEQ ID NO: 747 - protein, 11 aa, Artificial Sequence
  Synthetic Construct
SGYTFTDFYMN

SEQ ID NO: 748 - protein, 11 aa, Artificial Sequence
  Synthetic Construct
SGYTFTAYWMH

SEQ ID NO: 749 - protein, 11 aa, Artificial Sequence
  Synthetic Construct
SGFNIKNTYIH

SEQ ID NO: 750 - protein, 11 aa, Artificial Sequence
  Synthetic Construct
SGYTFTNYWIH

SEQ ID NO: 751 - protein, 11 aa, Artificial Sequence
  Synthetic Construct
SGYTFTSATMH

SEQ ID NO: 752 - protein, 9 aa, Artificial Sequence
  Synthetic Construct
YSFTDYNIH

SEQ ID NO: 753 - protein, 9 aa, Artificial Sequence
  Synthetic Construct
FTLSNYWMN

SEQ ID NO: 754 - protein, 9 aa, Artificial Sequence
  Synthetic Construct
YTFTDYNIH

SEQ ID NO: 755 - protein, 14 aa, Artificial Sequence
  Synthetic Construct
IGDINPNNGHTTYN

SEQ ID NO: 756 - protein, 14 aa, Artificial Sequence
  Synthetic Construct
IGRTHPSDSDTNYN

SEQ ID NO: 757 - protein, 14 aa, Artificial Sequence
  Synthetic Construct
IGRIDPAIGNTNYA

SEQ ID NO: 758 - protein, 14 aa, Artificial Sequence
  Synthetic Construct
IGRIHPSDSDINYN

SEQ ID NO: 759 - protein, 14 aa, Artificial Sequence
  Synthetic Construct
IGYINPNSGYSKYN

SEQ ID NO: 760 - protein, 14 aa, Artificial Sequence
  Synthetic Construct
IGYINPNSDNTRYI

SEQ ID NO: 761 - protein, 16 aa, Artificial Sequence
  Synthetic Construct
VAQIRLKSDNYATHYA

SEQ ID NO: 762 - protein, 14 aa, Artificial Sequence
  Synthetic Construct
IGYINPNNGGTTYN

SEQ ID NO: 763 - protein, 16 aa, Artificial Sequence
  Synthetic Construct
AREPYSYGSSPWYFLV

SEQ ID NO: 764 - protein, 13 aa, Artificial Sequence
  Synthetic Construct
ATYSNYVTGAMDS

SEQ ID NO: 765 - protein, 7 aa, Artificial Sequence
  Synthetic Construct
VSPGMDY

SEQ ID NO: 766 - protein, 9 aa, Artificial Sequence
  Synthetic Construct
VKTGTSFAS

SEQ ID NO: 767 - protein, 16 aa, Artificial Sequence
  Synthetic Construct
ARWGIDGNYGGGFFDV

SEQ ID NO: 768 - protein, 12 aa, Artificial Sequence
  Synthetic Construct
TRGFSNLGAMDY

SEQ ID NO: 769 - protein, 10 aa, Artificial Sequence
  Synthetic Construct
TGAGGNHENY

SEQ ID NO: 770 - protein, 9 aa, Artificial Sequence
  Synthetic Construct
ATTYVSFSY

SEQ ID NO: 771 - protein, 25 aa, Artificial Sequence
  Synthetic Construct
  VARIANT 1, 4: Xaa = Glutamic acid or Glutamine
XVVXTQTPLSLPVSLGDQASFSCRS

SEQ ID NO: 772 - protein, 25 aa, Artificial Sequence
  Synthetic Construct
NIVMTQSPKSMSMSVGERVTLTCKA

SEQ ID NO: 773 - protein, 25 aa, Artificial Sequence
  Synthetic Construct
DVVMTQTPLSLPVSLGDQASISCRS

SEQ ID NO: 774 - protein, 25 aa, Artificial Sequence
  Synthetic Construct
DIVLTQSPASLAVSLGQRATISCRA

SEQ ID NO: 775 - protein, 25 aa, Artificial Sequence
  Synthetic Construct
  VARIANT 14: Xaa = Glutamic acid or Glutamine
DIQMTQFPASLAAXVGESVTITCRA

SEQ ID NO: 776 - protein, 22 aa, Artificial Sequence
  Synthetic Construct
ILLTQSPAILSVSPGERVSFSC

SEQ ID NO: 777 - protein, 15 aa, Artificial Sequence
  Synthetic Construct
WFLQKPGQSPKLLIF

SEQ ID NO: 778 - protein, 15 aa, Artificial Sequence
  Synthetic Construct
WYQQKPGQPPKLLIY

SEQ ID NO: 779 - protein, 15 aa, Artificial Sequence
  Synthetic Construct
WYQQKQGKSPQLLIY

SEQ ID NO: 780 - protein, 15 aa, Artificial Sequence
  Synthetic Construct
WYQQRTNGSPRLLIK

SEQ ID NO: 781 - protein, 32 aa, Artificial Sequence
  Synthetic Construct
GVPDRFSGSGSGTDFTLRISRVEAEDLGVYFC

SEQ ID NO: 782 - protein, 32 aa, Artificial Sequence
  Synthetic Construct
GVPARFSGSGSGTDFSLNIHPVEEDDIAMYFC

SEQ ID NO: 783 - protein, 32 aa, Artificial Sequence
  Synthetic Construct
GVPSRFSGSGSGTQYSMKINSMQPEDTAIYFC

SEQ ID NO: 784 - protein, 32 aa, Artificial Sequence
  Synthetic Construct
GIPSRFSGSGSGTDFTLNINSVESEDIADYYC

SEQ ID NO: 785 - protein, 24 aa, Artificial Sequence
  Synthetic Construct
  VARIANT 4: Xaa = Glutamic acid or Glutamine
EVQXQQSGPELVKPGASVKISCKA

SEQ ID NO: 786 - protein, 24 aa, Artificial Sequence
  Synthetic Construct
QVQLQQPGAELVKPGASVKVSCKA

SEQ ID NO: 787 - protein, 24 aa, Artificial Sequence
  Synthetic Construct
QVQLQQSVAELVRPGASVKLSCTA

SEQ ID NO: 788 - protein, 24 aa, Artificial Sequence
  Synthetic Construct
QVQLQQSGAELVKPGASVKVSCKA

SEQ ID NO: 789 - protein, 24 aa, Artificial Sequence
  Synthetic Construct
  VARIANT 1, 2, 3, 4, 5: Xaa = Any Amino Acid
XXXXXQSGTELARPGASVKMPCKA

SEQ ID NO: 790 - protein, 26 aa, Artificial Sequence
  Synthetic Construct
QVQLQQSGRELVKPGASVKMSCMSSG

SEQ ID NO: 791 - protein, 26 aa, Artificial Sequence
  Synthetic Construct
QVKLEESGGGLVQPGGSMKLSCVASG

SEQ ID NO: 792 - protein, 26 aa, Artificial Sequence
  Synthetic Construct
QVQLQQSGPELVKPGASVQMSCEASG

SEQ ID NO: 793 - protein, 12 aa, Artificial Sequence
  Synthetic Construct
WVKQSLGKSLEW

SEQ ID NO: 794 - protein, 12 aa, Artificial Sequence
  Synthetic Construct
WVKEKPGQGLEW

SEQ ID NO: 795 - protein, 12 aa, Artificial Sequence
  Synthetic Construct
WVKQRPEQGLEW

SEQ ID NO: 796 - protein, 12 aa, Artificial Sequence
  Synthetic Construct
WVKQRPGQGLEW

SEQ ID NO: 797 - protein, 12 aa, Artificial Sequence
  Synthetic Construct
WVIQSHGESLEW

SEQ ID NO: 798 - protein, 35 aa, Artificial Sequence
  Synthetic Construct
  VARIANT 27: Xaa = Glutamic acid or Glutamine
QKFKGKATLTVDKSSSTAYMELRSLTXEESAVYYC

SEQ ID NO: 799 - protein, 35 aa, Artificial Sequence
  Synthetic Construct
HNFKGKATLTVDKSSSTAYMQLNSLTSEDSAVYYC

SEQ ID NO: 800 - protein, 35 aa, Artificial Sequence
  Synthetic Construct
PKFQATATITVATSSNSAYLQLSSLASEDTAIYYC

SEQ ID NO: 801 - protein, 36 aa, Artificial Sequence
  Synthetic Construct
QKFKGKATLTVDKSSSTAYMQILSSLTSEDSAVYYC

SEQ ID NO: 802 - protein, 35 aa, Artificial Sequence
  Synthetic Construct
QKFKDKATLTADKSSSTAYMQLSSLTSEESAVYYC

SEQ ID NO: 803 - protein, 35 aa, Artificial Sequence
  Synthetic Construct
QKFKGKATLTVNKSSSTAYMELRSLTSEDSAVYYC

SEQ ID NO: 804 - protein, 35 aa, Artificial Sequence
  Synthetic Construct
ESVKGRFTISRDDSKSSVYLQMNNLRAVDTGIYYC

SEQ ID NO: 805 - protein, 35 aa, Artificial Sequence
  Synthetic Construct
QKFKGKATLTVNKSSSTAYIELRSLTSEDSAVYHC

SEQ ID NO: 806 - protein, 9 aa, Artificial Sequence
  Synthetic Construct
RGTGTTVTV

SEQ ID NO: 807 - protein, 11 aa, Artificial Sequence
  Synthetic Construct
WGHGTSVTVSS

SEQ ID NO: 808 - protein, 10 aa, Artificial Sequence
  Synthetic Construct
WSQGTLVTVS

SEQ ID NO: 809 - protein, 112 aa, Artificial Sequence
  Synthetic Construct
  VARIANT 1, 4: Xaa = Glutamic acid or Glutamine
XVVXTQTPLSLPVSLGDQASFSCRSSQSLVHSNGNTYLHWFLQKPGQSPKLLIFKVSNRVSGVPDRFSGSGSGTDFTLKISRVEAEDLGVYFCSQSTHVPLTFGAGTKLELK

SEQ ID NO: 810 - protein, 107 aa, Artificial Sequence
  Synthetic Construct
NIVMTQSPKSMSMSVGERVTLTCKASENVVTYVSWYQQKPEQSPKLLIYGASNRYTGVPDRFTGSGSATDFTLTISSVQAEDLADYHCGQGYSYPYTFGGGTKLEIK

SEQ ID NO: 811 - protein, 112 aa, Artificial Sequence
  Synthetic Construct
DVVMTQTPLSLPVSLGDQASISCRSSQSLVHSNGNTYLHWYLQKPGQSPKLLIYKVSDRFSGVPDRFSGSGSGTDFTLRISRVEAEDLGVYFCSQSTHVPLTFGAGTKLELK

SEQ ID NO: 812 - protein, 112 aa, Artificial Sequence
  Synthetic Construct
DVVMTQTPLSLPVSLGDQASISCRSSQSLVHSNGDTYLHWYLQKPGQSPKLLIYKVSNRFSGVPDRFSGSGSGTDFTLKISRVEAEDLGVYFCSQSTHVPLTFGAGTKLELK

SEQ ID NO: 813 - protein, 111 aa, Artificial Sequence
  Synthetic Construct
DIVLTQSPASLAVSLGQRATISCRASESVDYHGTSLMQWYQQKPGQPPKLLIYAASNVESGVPARFSGSGSGTDFSLNIHPVEEDDIAMYFCQQNRKILWTFGGGTKLEIK

SEQ ID NO: 814 - protein, 107 aa, Artificial Sequence
  Synthetic Construct
  VARIANT 14, 30: Xaa = Glutamic acid or Glutamine
DIQMTQFPASLAAXVGESVTITCRASENIXYSLAWYQQKQGKSPQLLIYNANSLEDGVPSRFSGSGSGTQYSMKINSMQPEDTAIYFCKQAYDVPWTFGGGTKLEIK

SEQ ID NO: 815 - protein, 106 aa, Artificial Sequence
  Synthetic Construct
ILLTQSPAILSVSPGERVSFSCRASQSIGTSIHWYQQRTNGSPRLLIKFASESISGIPSRFSGSGSGTDFTLNINSVESEDIADYYCQQTNTWPITFGAGTKLELK

SEQ ID NO: 816 - protein, 112 aa, Artificial Sequence
  Synthetic Construct
DVVMTQTPLSLPVSLGDQASISCRSSQSLVHSNGNTYLHWYLQKPGQSPKLLIYKVSNRFSGVPDRFSGSGSGTDFTLKISRVEAEDLGVYFCSQSTHVPLTFGAGTKLELK

SEQ ID NO: 817 - protein, 121 aa, Artificial Sequence
  Synthetic Construct
  VARIANT 4, 88: Xaa = Glutamic acid or Glutamine
EVQXQQSGPELVKPGASVKISCKASGYTFTDFYMNWVKQSLGKSLEWIGDINPNNGHTTYNQKFKGKATLTVDKSSSTAYMELRSLTXEESAVYYCAREPYSYGSSPWYFLVRGTGTTVTV

SEQ ID NO: 818 - protein, 120 aa, Artificial Sequence
  Synthetic Construct
QVQLQQPGAELVKPGASVKVSCKASGYTFTAYWMHWVKEKPGQGLEWIGRTHPSDSDTNYNHNFKGKATLTVDKSSSTAYMQLNSLTSEDSAVYYCATYSNYVTGAMDSWGQGTSVTVSS

SEQ ID NO: 819 - protein, 114 aa, Artificial Sequence
  Synthetic Construct
QVQLQQSVAELVRPGASVKLSCTASGFNIKNTYIHWVKQRPEQGLEWIGRIDPAIGNTNYAPKFQATATITVATSSNSAYLQLSSLASEDTAIYYCVSPGMDYWGHGTSVTVSS

SEQ ID NO: 820 - protein, 116 aa, Artificial Sequence
  Synthetic Construct
QVQLQQSGAELVKPGASVKVSCKASGYTFTNYWIHWVKQRPGQGLEWIGRIHPSDSDINYNQKFKGKATLTVDKSSSTAYMQILSSLTSEDSAVYYCVKTGTSFASWSQGTLVTVS

SEQ ID NO: 821 - protein, 105 aa, Artificial Sequence
  Synthetic Construct
EIVLTQSPATLSLSPGERATLSCKASSNVNYMSWYQQKPGQAPRLLIYFTSNLPSGIPARFSGSGSGTDFTLTISSLEPEDFAVYYCSGEVTQFTFGQGTKVEIK

SEQ ID NO: 822 - protein, 123 aa, Artificial Sequence
  Synthetic Construct
  VARIANT 1, 2, 3, 4, 5: Xaa = Any Amino Acid
XXXXXQSGTELARPGASVKMPCKASGYTFTSATMHWVKQRPGQGLEWIGYINPNSGYSKYNQKFKDKATLTADKSSSTAYMQLSSLTSEESAVYYCARWGIDGNYGGGFFDVWGTGTTVTVSS

SEQ ID NO: 823 - protein, 119 aa, Artificial Sequence
  Synthetic Construct
QVQLQQSGRELVKPGASVKMSCMSSGYSFTDYNIHWVIQSHGESLEWIGYINPNSDNTRYIQKFKGKATLTVNKSSSTAYMELRSLTSEDSAVYYCTRGFSNLGAMDYWGQGTSVTVSS

SEQ ID NO: 824 - protein, 119 aa, Artificial Sequence
  Synthetic Construct
QVKLEESGGGLVQPGGSMKLSCVASGFTLSNYWMNWVRQSPEKGLEWVAQIRLKSDNYATHYAESVKGRFTISRDDSKSSVYLQMNNLRAVDTGIYYCTGAGGNHENYWGQGTTLTVSS

SEQ ID NO: 825 - protein, 116 aa, Artificial Sequence
  Synthetic Construct
QVQLQQSGPELVKPGASVQMSCEASGYTFTDYNIHWVKQSHGKSLEWIGYINPNNGGTTYNQKFKGKATLTVNKSSSTAYIELRSLTSEDSAVYHCATTYVSFSYWGQGTLVTVSA

SEQ ID NO: 826 - protein, 11 aa, Artificial Sequence
  Synthetic Construct
  VARIANT 2, 6, 9: Xaa = Any Amino Acid
RXSENXYSXLA

SEQ ID NO: 827 - protein, 16 aa, Artificial Sequence
  Synthetic Construct
  VARIANT 5, 6, 7, 12, 16: Xaa = Any Amino Acid
RSSQXXXHSNGXTYLX

SEQ ID NO: 828 - protein, 17 aa, Artificial Sequence
  Synthetic Construct
  VARIANT 6, 7, 8, 10, 11, 14, 15, 17: Xaa = Any Amino Acid
KSSQSXXXSXXQKXXLX

SEQ ID NO: 829 - protein, 9 aa, Artificial Sequence
  Synthetic Construct
  VARIANT 2: Xaa = T or S
  VARIANT 3: Xaa = F or V
  VARIANT 4: Xaa = T ot S
  VARIANT 5, 7, 8: Xaa = Any Amino Acid
YXXXXYXXH

SEQ ID NO: 830 - protein, 9 aa, Artificial Sequence
  Synthetic Construct
  VARIANT 5, 7, 8: Xaa = Any Amino Acid
YTFTXYXXH

SEQ ID NO: 831 - protein, 9 aa, Artificial Sequence
  Synthetic Construct
  VARIANT 9: Xaa = D or G
FTFSDAWMX

SEQ ID NO: 832 - protein, 9 aa, Artificial Sequence
  Synthetic Construct
  VARIANT 2: Xaa = Any Amino Acid
  VARIANT 3: Xaa = F or L
  VARIANT 4: Xaa = N or S
  VARIANT 5: Xaa = T or N
  VARIANT 7: Xaa = A, S, or W
  VARIANT 9: Xaa = N, K, or T
FXXXXYXMX

SEQ ID NO: 833 - protein, 9 aa, Artificial Sequence
  Synthetic Construct
  VARIANT 2: Xaa = Any Amino Acid
FXFNTYAMN

SEQ ID NO: 834 - protein, 9 aa, Artificial Sequence
  Synthetic Construct
  VARIANT 2: Xaa = Any Amino Acid
  VARIANT 4: Xaa = S or T
  VARIANT 5: Xaa = N, S, or T
  VARIANT 6: Xaa = Any Amino Acid
  VARIANT 8: Xaa = I or M
  VARIANT 9: Xaa = Any Amino Acid
YXFXXXWXX

SEQ ID NO: 835 - protein, 9 aa, Artificial Sequence
  Synthetic Construct
  VARIANT 2, 6, 9: Xaa = Any Amino Acid
YXFSNXWIX

SEQ ID NO: 836 - protein, 14 aa, Artificial Sequence
  Synthetic Construct
  VARIANT 3, 4, 5: Xaa = Any Amino Acid
  VARIANT 7: Xaa = N or E
  VARIANT 8: Xaa = N, S, or T
  VARIANT 9: Xaa = G or D
  VARIANT 10: Xaa = G, D, or N
  VARIANT 11: Xaa = T, S, or N
  VARIANT 12: Xaa = Any Amino Acid
  VARIANT 14: Xaa = N, S, K, or I
IGXXXPXXXXXXYX

SEQ ID NO: 837 - protein, 14 aa, Artificial Sequence
  Synthetic Construct
  VARIANT 3, 4, 5, 12: Xaa = Any Amino Acid
IGXXXPNNGGTXYN

SEQ ID NO: 838 - protein, 16 aa, Artificial Sequence
  Synthetic Construct
  VARIANT 6: Xaa = N or D
  VARIANT 8: Xaa = V or I
  VARIANT 9: Xaa = N or K
VAEIRXKXXNHATYYA

SEQ ID NO: 839 - protein, 16 aa, Artificial Sequence
  Synthetic Construct
  VARIANT 1: Xaa = Any Amino Acid
  VARIANT 2: Xaa = A or G
  VARIANT 3: Xaa = Any Amino Acid
  VARIANT 5: Xaa = R or K
  VARIANT 6: Xaa = S, T, R, or L
  VARIANT 7: Xaa = K or N
  VARIANT 8: Xaa = S, E, or Q
  VARIANT 9: Xaa = N, S, or D
  VARIANT 10: Xaa = N or D
  VARIANT 11: Xaa = Y or F
  VARIANT 14: Xaa = Any Amino Acid
  VARIANT 16: Xaa = A or S
XXXIXXXXXXXATXYX

SEQ ID NO: 840 - protein, 16 aa, Artificial Sequence
  Synthetic Construct
  VARIANT 1, 3, 14: Xaa = Any Amino Acid
XAXIRSKSNNYATXYA

SEQ ID NO: 841 - protein, 14 aa, Artificial Sequence
  Synthetic Construct
  VARIANT 3: Xaa = Any Amino Acid
  VARIANT 5: Xaa = Y or D
  VARIANT 7: Xaa = G or N
  VARIANT 8: Xaa = Any Amino Acid
  VARIANT 9: Xaa = G or D
  VARIANT 10: Xaa = N or D
  VARIANT 11: Xaa = T, R, or S
  VARIANT 12: Xaa = N or K
  VARIANT 13: Xaa = Y or F
IGXIXPXXXXXXXN

SEQ ID NO: 842 - protein, 14 aa, Artificial Sequence
  Synthetic Construct
  VARIANT 3, 8: Xaa = Any Amino Acid
IGXIYPGXGDTNYN

SEQ ID NO: 843 - protein, 112 aa, Artificial Sequence
  Synthetic Construct
DIVMTQTPLSLSVTPGQPASISCRSSQSLVHSNGYTYLHWYLQKPGQSPQLLIYKVSNRFSGVPDRFSGSGSGTDFTLKISRVEAEDVGVYYCSQSTRVPYTFGQGTKLEIK

SEQ ID NO: 844 - protein, 112 aa, Artificial Sequence
  Synthetic Construct
DVVMTQTPLSLSVTPGQPASISCRSSQSLVHSNGYTYLHWYLQKPGQSPQLLIYKVSNRFSGVPDRFSGSGSGTDFTLKISRVEAEDVGVYYCSQSTRVPYTFGQGTKLEIK

SEQ ID NO: 845 - protein, 123 aa, Artificial Sequence
  Synthetic Construct
QVQLVQSGAEVKKPGASVKVSCKASGYAFSSSWMNWVRQAPGQGLEWMGRIYPGDGDTNYAQKFQGRVTMTRDTSTSTVYMELSSLRSEDTAVYYCARLLRNQPGESYAMDYWGQGTLVTVSS

SEQ ID NO: 846 - protein, 123 aa, Artificial Sequence
  Synthetic Construct
QVQLVQSGAEVKKPGASVKVSCKASGYAFSSSWMNWVRQAPGQGLEWIGRIYPGDGDTNYAQKFQGRVTMTADTSTSTVYMELSSLRSEDTAVYYCARLLRNQPGESYAMDYWGQGTLVTVSS

SEQ ID NO: 847 - protein, 123 aa, Artificial Sequence
  Synthetic Construct
QVQLVQSGAEVKKPGASLKISCKASGYAFSSSWMNWVRQAPGQGLEWIGRIYPGDGDTNYAQKFQGRATLTADTSTSTAYMELSSLRSEDTAVYYCARLLRNQPGESYAMDYWGQGALVTVSS

SEQ ID NO: 848 - protein, 32 aa, Artificial Sequence
  Synthetic Construct
GVPDRFSGSGSGTDFTLKISRVEADDLGVYFC

SEQ ID NO: 849 - protein, 112 aa, Artificial Sequence
  Synthetic Construct
DVVMTQTPLTLSVTIGQPASISCKSSQSLLYSNGKTFLSWLLQRPGQSPKRLIYLVSKLDSGVPDRFAGSGSGTDFTLKISRLEADDLGIYYCMQGTHFPLTFGAGTKLELK

SEQ ID NO: 850 - protein, 112 aa, Artificial Sequence
  Synthetic Construct
DVVMTQTPLSLPVSLGDQASISCRSSQSLVHSNGYTYLHWYLQKPGQSPKLLIYKVSNRFSGVPDRFSGSGSGTDFTLKISRVEADDLGVYFCSQSTRVPYTFGGGTKLEIK

SEQ ID NO: 851 - protein, 126 aa, Homo sapiens
LHPLLLLLLLFPGSQAQSKAQVLQSVAGQTLTVRCQYPPTGSLYEKKGWCKEASALVCIRLVTSSKPRTMAWTSRFTIWDDPDAGFFTVTMTDLREEDSGHYWCRIYRPSDNSVSKSVRFYLVVSP

SEQ ID NO: 852 - protein, 132 aa, Artificial Sequence
  Consensus Sequence
  VARIANT 1, 2, 5, 8, 12, 13, 14, 15, 16, 17, 18, 19, 20, 21, 22, 24,26, 31, 33, 35, 37, 39, 40, 41, 42, 43, 44, 45, 46, 47,49, 52, 53, 54, 55, 56, 57, 58, 59, 61, 63, 65, 66, 67,68, 69, 70, 71, 72, 73, 74, 75, 76, 77, 79, 80, 81, 82,83: Xaa = Any Amino Acid
  VARIANT 85, 88, 89, 90, 92, 93, 95, 97, 98, 99, 101, 102, 103, 105,107, 109, 111, 112, 113, 114, 115, 117, 118, 119, 120, 121,122, 123, 125, 126, 127, 128, 129, 130, 131: Xaa = Any Amino Acid
XXPLXLLXLLFXXXXXXXXXXXVXQXVAGQXLXVXCXYXXXXXXXXXKXWCXXXXXXXXCXRXVXXXXXXXXXXXXXWXXXXXIXDDXXXGXXTXTXXXLXXXDXGXYXCXXXXXSXXXXXXXVXXXXXXXP

SEQ ID NO: 853 - protein, 118 aa, Homo sapiens
ELRAATKLTGEKYELKEGQTLDVKCDYTLEKFASSQKAWQIIRDGEMPKTLACTERPSKNSHPVQVGRIILEDYHDHGLLRVRMVNLQVEDSGLYQCVIYQPPKEPHMLFDRIRLVVT

SEQ ID NO: 854 - protein, 121 aa, Homo sapiens
VTELSGAHNTTVFQGVAGQSLQVSCPYDSMKHWGRRKAWCRQLGEKGPCQRVVSTHNLWLLSFLRRWNGSTAITDDTLGGTLTITLRNLQPHDAGLYQCQSLHGSEADTLRKVLVEVLADP

SEQ ID NO: 855 - protein, 120 aa, Mus musculus
EVKAAIVLEEERYDLVEGQTLTVKCPFNIMKYANSQKAWQRLPDGKEPLTLVVTQRPFTRPSEVHMGKFTLKHDPSEAMLQVQMTDLQVTDSGLYRCVIYHPPNDPVVLFHPVRLVVTKG

SEQ ID NO: 856 - protein, 121 aa, Mus musculus
ITALSQALNTTVLQGMAGQSLRVSCTYDALKHWGRRKAWCRQLGEEGPCQRVVSTHGVWAAGLPEEADGSTVIADDTLAGTVTITLKNLQAGDAGLYQCQSLRGREREVLQKVLVEVLEDP

SEQ ID NO: 857 - protein, 121 aa, Mus musculus
LCVSGLQAGDEEEHKCFLEGENLTLTCPYNIMLYSLSLKAWQRVRSHGSPETLVLTNTRKADFNVARAGKYLLEDYPTESVVKVTVTGLQRQDVGLYQCVVYLSPDNVIILRQRIRLAWCQ

SEQ ID NO: 858 - protein, 112 aa, Homo sapiens
SQAQSKAQVLQSVAGQTLTVRCQYPPTGSLYEKKGWCKEASALVCIRLVTSSKPRTMAWTSRFTIWDDPDAGFFTVTMTDLREEDSGHYWCRIYRPSDNSVSKSVRFYLVVS

SEQ ID NO: 859 - protein, 109 aa, Homo sapiens
EVEQNSGPLSVPEGAIASLNCTYSDRGSQSFFWYRQYSGKSPELIMSIYSNGDKEDGRFTAQLNKASQYVSLLIRDSQPSDSATYLCAVTTDSWGKLQFGAGTQVVVTP

SEQ ID NO: 860 - protein, 114 aa, Homo sapiens
GVTQTPKFQVLKTGQSMTLQCAQDMNHEYMSWYRQDPGMGLRLIHYSVGAGITDQGEVPNGYNVSRSTTEDFPLRLLSAAPSQTSVYFCASRPGLAGGRPEQYFGPGTRLTVTE

SEQ ID NO: 861 - protein, 120 aa, Homo sapiens
HLEQPQISSTKTLSKTARLECVVSGITISATSVYWYRERPGEVIQFLVSISYDGTVRKESGIPSGKFEVDRIPETSTSTLTIHNVEKQDIATYYCALWEAQQELGKKIKVFGPGTKLIIT

SEQ ID NO: 862 - protein, 119 aa, Homo sapiens
AIELVPEHQTVPVSIGVPATLRCSMKGEAIGNYYINWYRKTQGNTMTFIYREKDIYGPGFKDNFQGDIDIAKNLAVLKILAPSERDEGSYYCACDTLGMGGEYTDKLIFGKGTRVTVEP

SEQ ID NO: 863 - protein, 116 aa, Homo sapiens
DKVTQSSPDQTVASGSEVVLLCTYDTVYSNPDLFWYRIRPDYSFQFVFYGDDSRSEGADFTQGRFSVKHILTQKAFHLVISPVRTEDSATYYCAFTLPPPTDKLIFGKGTRVTVEP

SEQ ID NO: 864 - protein, 115 aa, Mus musculus
QLQQSGAELMKPGASVKISCKASGYTFSDYWIEWVKQRPGHGLEWIGEILPGSGSTNYHERFKGKATFTADTSSSTAYMQLNSLTSEDSGVYYCLHGNYDFDGWGQGTTLTVSSA

SEQ ID NO: 865 - protein, 103 aa, Mus musculus
VLTQSPAIMSASPGEKVTMTCSASSSVNYMYWYQQKSGTPKRWIYDTSKLASGVPVRFSGSGSGTSYSLTISSMETEDAATYYCQQWGRNPTFGGGTKLEIKR

SEQ ID NO: 866 - protein, 113 aa, Homo sapiens
QFRVSPLDRTWNLGETVELKCQVLLSNPTSGCSWLFQPRGAAASPTFLLYLSQNKPKAAEGLDTQRFSGKRLGDTFVLTLSDFRRENEGYYFCSALSNSIMYFSHFVPVFLPA

SEQ ID NO: 867 - protein, 115 aa, Homo sapiens
HVAQPAVVLASSRGIASFVCEYASPGKATEVRVTVLRQADSQVTEVCAATYMMGNELTFLDDSICTGTSSGNQVNLTIQGLRAMDTGLYICKVELMYPPPYYLGIGNGTQIYVID

SEQ ID NO: 868 - protein, 105 aa, Homo sapiens
LLWMLFVSELRAATKLTEEKYELKEGQTLDVKCDYTLEKFASSQKAWQIIRDGEMPKTLACTERPSKNSHPVQVGRIILEDYHDHGLLRVRMVNLQVEDSGLYQC

SEQ ID NO: 869 - protein, 107 aa, Artificial Sequence
  Consensus Sequence
  VARIANT 3, 4, 8, 11, 12, 14, 15, 16, 18, 19, 20, 21, 22, 23, 24,25, 28, 30, 32, 34, 36, 37, 38, 40, 41, 42, 43, 44, 48,49, 51, 52, 53, 54, 56, 57, 58, 59, 60, 61, 62, 63, 64,65, 66, 67, 68, 69, 70, 71, 72, 73, 74, 75, 76, 78, 79,80, 81: Xaa = Any Amino Acid
  VARIANT 82, 84, 85, 86, 87, 89, 91, 92, 93, 94, 95, 99, 100, 102: Xaa = Any Amino Acid
LLXXLFVXELXXAXXXTXXXXXXXXGQXLXVXCXYXXXKXXXXXKAWXXQXXXXGXXXXXXXXXXXXXXXXXXXXXGXXXXXDXXXXGXLXXXXXNLQXXDXGLYQC

SEQ ID NO: 870 - protein, 101 aa, Artificial Sequence
  Synthetic Construct
DIVMTQTPLSLSVTPGQPASISCKSSQSLLHSDGKTYLYWYLQKPGQSPQLLIYEVSNRFSGVPDRFSGSGSGTDFTLKISRVEAEDVGVYYCMQSIQLPP

SEQ ID NO: 871 - protein, 12 aa, Artificial Sequence
  Synthetic Construct
YTFGQGTKLEIK

SEQ ID NO: 872 - protein, 112 aa, Artificial Sequence; identical to SEQ ID NO: 850
  Synthetic Construct

SEQ ID NO: 873 - protein, 111 aa, Artificial Sequence
  Synthetic Construct
DIVMTQTPLSLSVTPGQPASISCKSSQSLLHSDGKTYLYWYLQKPGQSPQLLIYEVSNRFSGVPDRFSGSGSGTDFTLKISRVEAEDVGVYYCMQSIQLPPFGQGTKLEIK

SEQ ID NO: 874 - protein, 112 aa, Artificial Sequence; identical to SEQ ID NO: 843
  Synthetic Construct

SEQ ID NO: 875 - protein, 112 aa, Artificial Sequence; identical to SEQ ID NO: 844
  Synthetic Construct

SEQ ID NO: 876 - protein, 98 aa, Artificial Sequence
  Synthetic Construct
QVQLVQSGAEVKKPGASVKVSCKASGYTFTSYYMHWVRQAPGQGLEWMGIINPSGGSTSYAQKFQGRVTMTRDTSTSTVYMELSSLRSEDTAVYYCAR

SEQ ID NO: 877 - protein, 15 aa, Artificial Sequence
  Synthetic Construct
YFDYWGQGTLVTVSS

SEQ ID NO: 878 - protein, 123 aa, Artificial Sequence; identical to SEQ ID NO: 521
  Synthetic Construct

SEQ ID NO: 879 - protein, 109 aa, Artificial Sequence
  Synthetic Construct
QVQLVQSGAEVKKPGASVKVSCKASGYTFTSYYMHWVRQAPGQGLEWMGIINPSGGSTSYAQKFQGRVTMTRDTSTSTVYMELSSLRSEDTAVYYCARWGQGTLVTVSS

SEQ ID NO: 880 - protein, 123 aa, Artificial Sequence; identical to SEQ ID NO: 845
  Synthetic Construct

SEQ ID NO: 881 - protein, 123 aa, Artificial Sequence; identical to SEQ ID NO: 846
  Synthetic Construct

SEQ ID NO: 882 - protein, 123 aa, Artificial Sequence; identical to SEQ ID NO: 847
  Synthetic Construct

SEQ ID NO: 883 - protein, 19 aa, Artificial Sequence
  Synthetic Construct
  VARIANT 1: Xaa = D or E
  VARIANT 2, 3: Xaa = Any Amino Acid and up to 2 of them can be present or absent
  VARIANT 5, 6: Xaa = Any Amino Acid
  VARIANT 7: Xaa = L or I
  VARIANT 8, 9, 10, 11, 12, 13, 14, 15: Xaa = Any Amino Acid and up to 2 of them can be present or absent
  VARIANT 17, 18: Xaa = Any Amino Acid
  VARIANT 19: Xaa = L or I
XXXYXXXXXXXXXXXYXXX

SEQ ID NO: 884 - protein, 9 aa, Artificial Sequence
  Synthetic Construct
  VARIANT 5: Xaa = F or V
  VARIANT 7: Xaa = G or E
GDLWXPXES

SEQ ID NO: 885 - protein, 21 aa, Artificial Sequence
  Synthetic Construct
MEVGWYRSPFSRVVHLYRNGK

SEQ ID NO: 886 - protein, 110 aa, Artificial Sequence
  Synthetic Construct
ASTKGPSVFPLAPCSRSTSESTAALGCLVKDYFPEPVTVSWNSGALTSGVHTFPAVLQSSGLYSLSSVVTVPSSNFGTQTYTCNVDHKPSNTKVDKTVERKCCVECPPCP

SEQ ID NO: 887 - protein, 113 aa, Artificial Sequence
  Synthetic Construct
MGGLEPCSRLLLLPLLLAVSGLRPVQAQAQSDCSCSTVSPGVLAGIVMGDLVLTVLIALAVYFLGRLVPRGRGAAEAATRKQRITETESPYQELQGQRSDVYSDLNTQRPYYK

SEQ ID NO: 888 - protein, 17 aa, Artificial Sequence
  Synthetic Construct
RIYPGDGDTNYNGEFRV

1. An isolated antibody that binds to a TREM2 protein, wherein the antibody induces one or more TREM2 activities and enhances one or more TREM2 activities induced by binding of one or more TREM2 ligands to the TREM2 protein.

2. The isolated antibody of claim 1, wherein the antibody enhances one or more TREM2 activities induced by binding of one or more TREM2 ligands to the TREM2 protein, as compared to the one or more TREM2 activities induced by binding of the one or more TREM2 ligands to the TREM2 protein in the absence of the isolated antibody.

3. The isolated antibody of claim 1, wherein the antibody enhances the one or more TREM2 activities without blocking binding of the one or more TREM2 ligands to the TREM2 protein.

4. The isolated antibody of claim 1, wherein the antibody does not compete with the one or more TREM2 ligands for binding to the TREM2 protein.

5. The isolated antibody of claim 1, wherein the antibody enhances binding of the one or more TREM2 ligands to the TREM2 protein.

6.-10. (canceled)

11. The isolated antibody of claim 1, wherein the antibody enhances the one or more TREM2 activities in the absence of cell surface clustering of TREM2.

12. The isolated antibody of claim 1, wherein the antibody enhances the one or more TREM2 activities by inducing or retaining cell surface clustering of TREM2.

13.-23. (canceled)

24. The isolated antibody of claim 1, wherein the TREM2 protein is a mammalian protein or a human protein.

25. The isolated antibody of claim 24, wherein the TREM2 protein is a wild-type protein, a naturally occurring variant, or a disease variant.

26.-27. (canceled)

28. The isolated antibody of claim 1, wherein the one or more TREM2 activities are selected from the group consisting of:
(a) TREM2 binding to DAP12;
(b) DAP12 phosphorylation;
(c) activation of Syk kinase;
(d) modulation of one or more pro-inflammatory mediators selected from the group consisting of IFN-β, IL-1α, IL-1β, TNF-α, IL-6, IL-8, CRP, CD86, MCP-1/CCL2, CCL3, CCL4, CCL5, CCR2, CXCL-10, Gata3, IL-20 family members, IL-33, LIF, IFN-gamma, OSM, CNTF, CSF-1, OPN, CD11c, GM-CSF, IL-11, IL-12, IL-17, IL-18, and IL-23, optionally wherein the modulation occurs in one or more cells selected from the group consisting of macrophages, M1 macrophages, activated M1 macrophages, M2 macrophages, dendritic cells, monocytes, osteoclasts, Langerhans cells of skin, Kupffer cells, and microglial cells;
(e) recruitment of Syk to a DAP12/TREM2 complex;
(f) increasing activity of one or more TREM2-dependent genes, optionally wherein the one or more TREM2-dependent genes comprise nuclear factor of activated T-cells (NFAT) transcription factors;
(g) increased survival of dendritic cells, macrophages, M1 macrophages, activated M1 macrophages, M2 macrophages, monocytes, osteoclasts, Langerhans cells of skin, Kupffer cells, microglia, M1 microglia, activated M1 microglia, and M2 microglia, or any combination thereof;
(h) modulated expression of one or more stimulatory molecules selected from the group consisting of CD83, CD86 MHC class II, CD40, and any combination thereof, optionally wherein the CD40 is expressed on dendritic cells, monocytes, macrophages, or any combination thereof, and optionally wherein the dendritic cells comprise bone marrow-derived dendritic cells;
(i) increasing memory; and
(j) reducing cognitive deficit.

29. The isolated antibody of claim 1, wherein the antibody is of the IgG class, the IgM class, or the IgA class.

30. The isolated antibody of claim 29, wherein the antibody is of the IgG class and has an IgG1, IgG2, IgG3, or IgG4 isotype.

31.-36. (canceled)

37. The isolated antibody of claim 30, wherein:
(a) the isolated antibody has a human or mouse IgG1 isotype and comprises one or more amino acid substitutions in the Fc region at a residue position selected from the group consisting of: N297A, D265A, D270A, L234A, L235A, G237A, C226S, C229S, E233P, L234V, L234F, L235E, P331S, S267E, L328F, A330L, M252Y, S254T, T256E, L328E, P238D, S267E, L328F, E233D, G237D, H268D, P271G, A330R, and any combination thereof, wherein the numbering of the residues is according to EU numbering, or comprises an amino acid deletion in the Fc region at a position corresponding to glycine 236;
(b) the isolated antibody has an IgG1 isotype and comprises an IgG2 isotype heavy chain constant domain 1(CH1) and hinge region, optionally wherein the IgG2 isotype CH1 and hinge region comprises the amino acid sequence of ASTKGPSVFP LAPCSRSTSE STAALGCLVK DYFPEPVTVS WNSGALTSGVHTFPAVLQSS GLYSLSSVVT VPSSNFGTQT YTCNVDHKPS NTKVDKTVERKCCVECPPCP (SEQ ID NO: 886), and optionally wherein the antibody Fc region comprises a S267E amino acid substitution, a L328F amino acid substitution, or both, and/or a N297A or N297Q amino acid substitution, wherein the numbering of the residues is according to EU numbering;
(c) the isolated antibody has an IgG2 isotype and comprises one or more amino acid substitutions in the Fc region at a residue position selected from the group consisting of: P238S, V234A, G237A, H268A, H268Q, V309L, A330S, P331S, C214S, C232S, C233S, S267E, L328F, M252Y, S254T, T256E, H268E, N297A, N297Q, A330L, and any combination thereof, wherein the numbering of the residues is according to EU numbering;
(d) the isolated antibody has a human or mouse IgG4 isotype and comprises one or more amino acid substitutions in the Fc region at a residue position selected from the group consisting of: L235A, G237A, S228P, L236E, S267E, E318A, L328F, M252Y, S254T, T256E, E233P, F234V, L234A/F234A, S228P, S241P, L248E, T394D, N297A, N297Q, L235E, and any combination thereof, wherein the numbering of the residues is according to EU numbering; or
(e) the isolated antibody has a hybrid IgG2/4 isotype, and optionally wherein the antibody comprises an amino acid sequence comprising amino acids 118 to 260 of human IgG2 and amino acids 261 to 447 of human IgG4, wherein the numbering of the residues is according to EU numbering.

38.-47. (canceled)

48. The isolated antibody of claim 1, wherein the antibody binds to one or more amino acids within amino acid residues selected from the group consisting of:
i. amino acid residues 137-146 of SEQ ID NO: 1, or amino acid residues on a TREM2 protein corresponding to amino acid residues 137-146 of SEQ ID NO: 1;
ii. amino acid residues 139-147 of SEQ ID NO: 1, or amino acid residues on a TREM2 protein corresponding to amino acid residues 139-147 of SEQ ID NO: 1;
iii. amino acid residues 139-149 of SEQ ID NO: 1, or amino acid residues on a TREM2 protein corresponding to amino acid residues 139-149 of SEQ ID NO: 1;
iv. amino acid residues 142-152 of SEQ ID NO: 1, or amino acid residues on a TREM2 protein corresponding to amino acid residues 142-152 of SEQ ID NO: 1; and
v. amino acid residues 149-157 of SEQ ID NO: 1, or amino acid residues on a TREM2 protein corresponding to amino acid residues 149-157 of SEQ ID NO: 1.

49.-50. (canceled)

51. The isolated antibody of claim 48, wherein the antibody binds to one or more amino acid residues selected from the group consisting of E151, D152, H154, and E156 of SEQ ID NO: 1, or one or more amino acid residues on a mammalian TREM2 protein corresponding to an amino acid residue selected from the group consisting of E151, D152, H154, and E156 of SEQ ID NO: 1.

52. The isolated antibody of claim 1, wherein the antibody competes with one or more antibodies selected from the group consisting of 3B10, 8F8, 9F5, 9G3, 11A8, 12F9, 2F6, 3A7, 7E5, 11H5, and any combination thereof for binding to TREM2.

53.-54. (canceled)

55. The isolated antibody of claim 1, wherein:
(a) the HVR-L1 comprises the amino acid sequence of SEQ ID NO: 11 or an amino acid sequence with at least about 90% homology to the amino acid sequence of SEQ ID NO: 11, the HVR-L2 comprises the amino acid sequence of SEQ ID NO: 26 or an amino acid sequence with at least about 90% homology to the amino acid sequence of SEQ ID NO: 26, the HVR-L3 comprises the amino acid sequence of SEQ ID NO: 36 or an amino acid sequence with at least about 90% homology to the amino acid sequence of SEQ ID NO: 36, the HVR-H1 comprises the amino acid sequence of SEQ ID NO: 51 or an amino acid sequence with at least about 90% homology to the amino acid sequence of SEQ ID NO: 51, the HVR-H2 comprises the amino acid sequence of SEQ ID NO: 69 or an amino acid sequence with at least about 90% homology to the amino acid sequence of SEQ ID NO: 69, and the HVR-H3 comprises the amino acid sequence of SEQ ID NO: 88 or an amino acid sequence with at least about 90% homology to the amino acid sequence of SEQ ID NO: 88;
(b) the HVR-L1 comprises the amino acid sequence of SEQ ID NO: 14 or an amino acid sequence with at least about 90% homology to the amino acid sequence of SEQ ID NO: 14, the HVR-L2 comprises the amino acid sequence of SEQ ID NO: 28 or an amino acid sequence with at least about 90% homology to the amino acid sequence of SEQ ID NO: 28, the HVR-L3 comprises the amino acid sequence of SEQ ID NO: 39 or an amino acid sequence with at least about 90% homology to the amino acid sequence of SEQ ID NO: 39, the HVR-H1 comprises the amino acid sequence of SEQ ID NO: 53 or an amino acid sequence with at least about 90% homology to the amino acid sequence of SEQ ID NO: 53, the HVR-H2 comprises the amino acid sequence of SEQ ID NO: 71 or an amino acid sequence with at least about 90% homology to the amino acid sequence of SEQ ID NO: 71, and the HVR-H3 comprises the amino acid sequence of SEQ ID NO: 90 or an amino acid sequence with at least about 90% homology to the amino acid sequence of SEQ ID NO: 90;
(c) the HVR-L1 comprises the amino acid sequence of SEQ ID NO: 16 or an amino acid sequence with at least about 90% homology to the amino acid sequence of SEQ ID NO: 16, the HVR-L2 comprises the amino acid sequence of SEQ ID NO: 29 or an amino acid sequence with at least about 90% homology to the amino acid sequence of SEQ ID NO: 29, the HVR-L3 comprises the amino acid sequence of SEQ ID NO: 35 or an amino acid sequence with at least about 90% homology to the amino acid sequence of SEQ ID NO: 35, the HVR-H1 comprises the amino acid sequence of SEQ ID NO: 55 or an amino acid sequence with at least about 90% homology to the amino acid sequence of SEQ ID NO: 55, the HVR-H2 comprises the amino acid sequence of SEQ ID NO: 73 or an amino acid sequence with at least about 90% homology to the amino acid sequence of SEQ ID NO: 73, and the HVR-H3 comprises the amino acid sequence of SEQ ID NO: 92 or an amino acid sequence with at least about 90% homology to the amino acid sequence of SEQ ID NO: 92;
(d) the HVR-L1 comprises the amino acid sequence of SEQ ID NO: 19 or an amino acid sequence with at least about 90% homology to the amino acid sequence of SEQ ID NO: 19, the HVR-L2 comprises the amino acid sequence of SEQ ID NO: 28 or an amino acid sequence with at least about 90% homology to the amino acid sequence of SEQ ID NO: 28, the HVR-L3 comprises the amino acid sequence of SEQ ID NO: 43 or an amino acid sequence with at least about 90% homology to the amino acid sequence of SEQ ID NO: 43, the HVR-H1 comprises the amino acid sequence of SEQ ID NO: 60 or an amino acid sequence with at least about 90% homology to the amino acid sequence of SEQ ID NO: 60, the HVR-H2 comprises the amino acid sequence of SEQ ID NO: 78 or an amino acid sequence with at least about 90% homology to the amino acid sequence of SEQ ID NO: 78, and the HVR-H3 comprises the amino acid sequence of SEQ ID NO: 97 or an amino acid sequence with at least about 90% homology to the amino acid sequence of SEQ ID NO: 97;
(e) the HVR-L1 comprises the amino acid sequence of SEQ ID NO: 19 or an amino acid sequence with at least about 90% homology to the amino acid sequence of SEQ ID NO: 19, the HVR-L2 comprises the amino acid sequence of SEQ ID NO: 28 or an amino acid sequence with at least about 90% homology to the amino acid sequence of SEQ ID NO: 28, the HVR-L3 comprises the amino acid sequence of SEQ ID NO: 43 or an amino acid sequence with at least about 90% homology to the amino acid sequence of SEQ ID NO: 43, the HVR-H1 comprises the amino acid sequence of SEQ ID NO: 60 or an amino acid sequence with at least about 90% homology to the amino acid sequence of SEQ ID NO: 60, the HVR-H2 comprises the amino acid sequence of SEQ ID NO: 888 or an amino acid sequence with at least about 90% homology to the amino acid sequence of SEQ ID NO: 888, and the HVR-H3 comprises the amino acid sequence of SEQ ID NO: 97 or an amino acid sequence with at least about 90% homology to the amino acid sequence of SEQ ID NO: 97;
(f) the HVR-L1 comprises the amino acid sequence of SEQ ID NO: 21 or an amino acid sequence with at least about 90% homology to the amino acid sequence of SEQ ID NO: 21, the HVR-L2 comprises the amino acid sequence of SEQ ID NO: 32 or an amino acid sequence with at least about 90% homology to the amino acid sequence of SEQ ID NO:32, the HVR-L3 comprises the amino acid sequence of SEQ ID NO: 45 or an amino acid sequence with at least about 90% homology to the amino acid sequence of SEQ ID NO: 45, the HVR-H1 comprises the amino acid sequence of SEQ ID NO: 62 or an amino acid sequence with at least about 90% homology to the amino acid sequence of SEQ ID NO: 62, the HVR-H2 comprises the amino acid sequence of SEQ ID NO: 80 or an amino acid sequence with at least about 90% homology to the amino acid sequence of SEQ ID NO: 80, and the HVR-H3 comprises the amino acid sequence of SEQ ID NO: 99 or an amino acid sequence with at least about 90% homology to the amino acid sequence of SEQ ID NO: 99;
(g) the HVR-L1 comprises the amino acid sequence of SEQ ID NO: 22 or an amino acid sequence with at least about 90% homology to the amino acid sequence of SEQ ID NO: 22, the HVR-L2 comprises the amino acid sequence of SEQ ID NO: 29 or an amino acid sequence with at least about 90% homology to the amino acid sequence of SEQ ID NO: 29, the HVR-L3 comprises the amino acid sequence of SEQ ID NO: 46 or an amino acid sequence with at least about 90% homology to the amino acid sequence of SEQ ID NO: 46, the HVR-H1 comprises the amino acid sequence of SEQ ID NO: 63 or an amino acid sequence with at least about 90% homology to the amino acid sequence of SEQ ID NO: 63, the HVR-H2 comprises the amino acid sequence of SEQ ID NO: 82 or an amino acid sequence with at least about 90% homology to the amino acid sequence of SEQ ID NO: 82, and the HVR-H3 comprises the amino acid sequence of SEQ ID NO: 100 or an amino acid sequence with at least about 90% homology to the amino acid sequence of SEQ ID NO: 100; or
(h) the HVR-L1 comprises the amino acid sequence of SEQ ID NO: 16 or an amino acid sequence with at least about 90% homology to the amino acid sequence of SEQ ID NO: 16, the HVR-L2 comprises the amino acid sequence of SEQ ID NO: 29 or an amino acid sequence with at least about 90% homology to the amino acid sequence of SEQ ID NO: 29, the HVR-L3 comprises the amino acid sequence of SEQ ID NO: 35 or an amino acid sequence with at least about 90% homology to the amino acid sequence of SEQ ID NO: 35, the HVR-H1 comprises the amino acid sequence of SEQ ID NO: 65 or an amino acid sequence with at least about 90% homology to the amino acid sequence of SEQ ID NO: 65, the HVR-H2 comprises the amino acid sequence of SEQ ID NO: 84 or an amino acid sequence with at least about 90% homology to the amino acid sequence of SEQ ID NO: 84, and the HVR-H3 comprises the amino acid sequence of SEQ ID NO: 102 or an amino acid sequence with at least about 90% homology to the amino acid sequence of SEQ ID NO: 102.

56.-72. (canceled)

73. The isolated antibody of claim 25, wherein the antibody is a fragment and the fragment is a Fab, Fab′, Fab′-SH, F(ab′)2, Fv or scFv fragment.

74. The isolated antibody of claim 1, wherein the one or more TREM2 ligands are selected from the group consisting of E. coli cells, apoptotic cells, nucleic acids, anionic lipids, anionic lipids, APOE, APOE2, APOE3, APOE4, anionic APOE, anionic APOE2, anionic APOE3, anionic APOE4, lipidated APOE, lipidated APOE2, lipidated APOE3, lipidated APOE4, zwitterionic lipids, negatively charged phospholipids, phosphatidylserine, sulfatides, phosphatidylcholin, sphingomyelin, membrane phospholipids, lipidated proteins, proteolipids, lipidated peptides, lipidated amyloid beta peptide, and any combination thereof.

75. (canceled)

76. The isolated antibody of claim 1, wherein the antibody is a murine antibody, a humanized antibody, a bispecific antibody, a multivalent antibody, a conjugated antibody, or a chimeric antibody.

77. The isolated antibody of claim 1, wherein the antibody is a monoclonal antibody.

78.-81. (canceled)

82. The isolated antibody of claim 1, wherein the antibody binds specifically to both human TREM2 and mouse TREM2.

83. The isolated antibody of claim 1, wherein the antibody:
(a) has dissociation constant (K_{D}) for human TREM2 that ranges from about 12.8 nM to about 2.9 nM, or less than 2.9 nM, wherein the K_{D} is determined at a temperature of approximately 4° C.; or
(b) has dissociation constant (K_{D}) for mouse TREM2 that ranges from about 10.4 nM to about 1.2 nM, or less than 1.2 nM, wherein the K_{D} is determined at a temperature of approximately 4° C.

84.-91. (canceled)

92. An isolated nucleic acid comprising a nucleic acid sequence encoding the antibody of claim 1.

93. A vector comprising the nucleic acid of claim 92.

94. An isolated host cell comprising the vector of claim 93.

95. A method of producing an antibody that binds to TREM2, comprising culturing the cell of claim 94 so that the antibody is produced.

96. (canceled)

97. An isolated antibody that binds to TREM2 produced by the method of claim 95.

98. A pharmaceutical composition comprising the antibody of claim 1 and a pharmaceutically acceptable carrier.

99. A method of preventing, reducing risk, or treating an individual having a disease, disorder, or injury selected from the group consisting of dementia, frontotemporal dementia, Alzheimer's disease, Nasu-Hakola disease, cognitive deficit, memory loss, spinal cord injury, traumatic brain injury, multiple sclerosis, chronic colitis, ulcerative colitis, and cancer, comprising administering to an individual in need thereof a therapeutically effective amount of the isolated antibody of claim 1.

100.-101. (canceled)

102. The method of claim 99, wherein the disease, disorder, or injury is Alzheimer's disease.

103.-124. (canceled)

125. A method of inducing one or more TREM2 activities and enhancing one or more TREM2 activities induced by binding of one or more TREM2 ligands to a TREM2 protein in an individual in need thereof, comprising administering to the individual a therapeutically effective amount of the isolated antibody of claim 1.

126. A method of inducing or promoting innate immune cell survival in an individual in need thereof, comprising administering to the individual a therapeutically effective amount of the isolated antibody of claim 1.

127. (canceled)

128. The method of claim 99, wherein the individual has a heterozygous variant of TREM2, wherein the variant comprises one or more substitutions selected from the group consisting of:
i. a glutamic acid to stop codon substitution in the nucleic acid sequence encoding amino acid residue Glu14 of SEQ ID NO: 1;
ii. a glutamine to stop codon substitution in the nucleic acid sequence encoding amino acid residue Gln33 of SEQ ID NO: 1;
iii. a tryptophan to stop codon substitution in the nucleic acid sequence encoding amino acid residue Trp44 of SEQ ID NO: 1;
iv. an arginine to histidine amino acid substitution at an amino acid corresponding to amino acid residue Arg47 of SEQ ID NO: 1;
v. a tryptophan to stop codon substitution in the nucleic acid sequence encoding amino acid residue Trp78 of SEQ ID NO: 1;
vi. a valine to glycine amino acid substitution at an amino acid corresponding to amino acid residue Va1126 of SEQ ID NO: 1;
vii. an aspartic acid to glycine amino acid substitution at an amino acid corresponding to amino acid residue Asp134 of SEQ ID NO: 1; and
viii. a lysine to asparagine amino acid substitution at an amino acid corresponding to amino acid residue Lys186 of SEQ ID NO: 1.

129. The method of claim 99, wherein the individual has a heterozygous variant of TREM2, wherein the variant comprises a guanine nucleotide deletion at a nucleotide corresponding to nucleotide residue G313 of the nucleic acid sequence encoding SEQ ID NO: 1; a guanine nucleotide deletion at a nucleotide corresponding to nucleotide residue G267 of the nucleic acid sequence encoding SEQ ID NO: 1; or both.

130. The method of claim 99, wherein the individual has a heterozygous variant of DAP12, wherein the variant comprises one or more variants selected from the group consisting of:
i. a methionine to threonine substitution at an amino acid corresponding to amino acid residue Met1 of SEQ ID NO: 2;
ii. a glycine to arginine amino acid substitution at an amino acid corresponding to amino acid residue Gly49 of SEQ ID NO: 2;
iii. a deletion within exons 1-4 of the nucleic acid sequence encoding SEQ ID NO: 2;
iv. an insertion of 14 amino acid residues at exon 3 of the nucleic acid sequence encoding SEQ ID NO: 2; and
v. a guanine nucleotide deletion at a nucleotide corresponding to nucleotide residue G141 of the nucleic acid sequence encoding SEQ ID NO: 2.

131.-146. (canceled)
